United States Patent Application Publication US 2026/0265781 A1 - sequence listing, part 4

SEQ ID NO: 22 - DNA, 26290500 bp, synthetic construct (residues 6,572,626-8,763,500 of 26,290,500)
  source 1..26290500: mol_type = other DNA; note = Hot spot 1 - Chr 3 contig ref|NW_020822499.1 from Cricetulus griseus
ttattttattttaaaccatagggactcaaatcaccagccaaaatttctttacatgtctccttggctctcataagacacaactcataatgatgagacaagtcactttatctcagttcaaaagccctttttctaagccgtgcctgcaccatgcgggagcctctagcctgcttctcatacctgcaccatgcgggagcctctaggccgcttctcattccatctactagacaggagccgctatctgataagcgttcctactcccactcttcaaaggaagcgagaagctttgtggaaagctttcctgcctggttttatatttgctgatgtttgctatccaaatactgctgattgatttccaaatgtctattatgacacataagaaccagtgtgcaaaaaaaaagttattttaaagttattcgtttttacaagaatccatagtgcaaatgatttatatatatatataatgtatattatatatatatatatttaaaaactataaattagagatgacaatagaaagttacctctgaaaaggactattagtgtttttctattatttatttttctatagctattatttaaattaaaattttaatttaaaaagattaaaataacgttcaagaagttggttacatacatacttcagttttaattatttatttaataataaatgttattgcaaagcttattttcattctgagagaaaattgtgcttaattgttcaacatatgtcaatacataatagtgaagtgataaaaattgttgaattttgcatctaacaagcaagggtttgaaaacatggcaatactaccacagtatagttaccagataaaatacaagacaccaaattaaatttgagtttctgttcccaatagatagtatttagtatgaaatatttggaatatacttattaaaaattcttgcatgtctgaaattaaaattcaactgaacaccctacaaatttatttgaaagacttggcagtcttaggaaatgactagactgatcttttggggactcaagttttactgcatgtccgactataagagctttgtctacattcttggctgcattgaggactacaggaggggggcacacagaatgtccatggataatgatgctttcatttccttcttaccctgccctatatctaattcttaatattcttggtacccacttatatagacttccagatcaaaatgtcaacacacctttgcaaaacctaatacttttcatctgtcaagtttatgcatagcaggcattcagtcttttctaacactaggttcctgccttccgcaaatccccaagtgccatcctataagatataacatgtctccactctaacctcctacgcctgactttgtctccagatattgaagttggaagagtatagaattttccagaaatctgaatgtttggggttcctatttgataaaagcctgggtatttgcaaaatattgaccctagttgtattgatgttctgattttcctagaattttttagttttctatattttgtataaatgtatagtataagtgtaaagaaatgtattatttgctaaaactttcatgtgaaaaaaaaaaactactatttagaatcatacaggatgtaagccaggtggtaaatgagagtagtctgtgtgagcttcagaacatggtggggtctgagggttatttgaagggataaagtatgatttatagggtagtgaggtaggtcaaattatgttctcttcagttttttacactctagaccaaggccagcctagggatggactgtgcaaggacatagctcatgggtccttagacgtgcccacaggaatttaattatatggattccaaggaactagtctgccctcctctgtgggcagctgggtaagtcagcagggtgtagggggagtccagccttggctggggactaaaagagagcagaaatgaatcacaacacaaaggagattggataaatgatctaacccacattgagagggataactttttattgtccaactgcaaagagccagtgtctcacccaactcatcctctaatctcccttgctctggtcacagtggtagttatctctcagaatactcacaaggaagccttcctatccattttattaagtgaacccccccagtatttacaagaaacaaattttccattttggtctaaaatgtattttaatttttaaactttcaactcggaaattatttttttaaaataatatgatttgaaattactcttttctgaaatgaagagtaacaaacacgaagtttaacagtttctcactgtactgctaatgtcaaaatctgggttggtaaaggtaataaatctttattattcacagaacaatcaactaagcataaaagttgcccaaaaggaaaaacaatgacatcatagagcctgaaatgtcacaactgtgaacagtagtttcctttattctgggaaacggatagcttggtggggggcaggctttttgtgtatatattggcaggagaaaaactcaaatgacaacatttttacgtttttataagtaattcatgggaccgtgaatctgcaaggtttatttgctcaaaaccgtggcattgagtaaaaccaaaagaattggttaccaatacatttgctcagtctttcacaacaggtgccttttgagtttctggagagatggggtgctccccctccccatcccacccctctggtgcactgcccctcccccctcacacccctctggtatagccactctggagttgtataagcagtgtagtcatactagagaattgaaattactcactatggaaatgcatcaaaagtttcccctggggggaaaaaagttccattcatctccaagaaaagagaacattgtcaaaaccagcattggcatattccctgtatttttttctttcaaagggaatataacaagaaagtatgaggacttacattttcttagtagtctttaaaacatggagaaaataaccactttgtggcttattagcctcaaaaaacattattactaggttgaggcaaaagattgaggggtctgggtttgtggtgtttgacatccaactgcctgaaacctgactcaaaaggaaaatagactggagtcttcaatgtgcatctttgaatccattccctccaaggagtccggagcccaggcttgggaactgcttgagcactatagcctctatgtcagtaaagtaagaatgcaccccggtatgaaaggagaacggcccctccatgctcaataacctttgtgtttatacagcccagaaatgtaggtgctgtttacttattcagacacattagcataacttagctactgaaataatttattaattctttgtgaatgtcatatatgaatacattgtatatctttaaatgtttgttttagaggttaaaagcactggctgctctttcagaggtcctgagttcaattcccagcatccacatgatggctcacaaccatctttaatgagatctggtgccctcttctggcacacaggcagaacactatatacataatgaatgaatgaatgaatgaatgaatgaatgaatgaatgaatgttaaaaataaataaatatttattttatgtgtgggtgttttgccttcatgaatgcctggtgggcatcacacgcttgcctggtgcccatgagacttaaagagagtgtccaatcccccggaacttcagttacagacagttgtaagctaccctgtgggtactgagaattgaacctgagtcctttggaggagcagccagttctcttaactgttgagctatctctctagccctaaggatatatttgaattatattcaccttctaccaatccttcctctaactcttcttgggtacatctccaccctctatttctgttcgacttcatgtcccctccctgtttctttaagtccactgagttcaatttgggatacccatacacttatgggtgtagggccatccactgtctgactcttcctcccttagcatccatcaactgtcaacatcgttggagctcaaggtagagcttcacactctccttccctcccaatgctggaatgccaactggcttgaccttctgcaggtcttgtacaggcaaccacaagtgttgtgaattcttgaatgcattggcccaagtgatgttcagaagacacagtttcaccccagttttgcttttgctgacttcttgttcttacagtctttataccttaccttcagcaatgttacttgagccttgggaagcaagtgtgatatagatgtcccattcatgactgagcactccacagaaacttggaaattatagggtcctaggagattgtcttagtctagccttggttagtcccaaagattttaggattttttttctagaaatatatcaaggaaactaaaacaaattatatcaaaacttgcttcttaggttcaattaattttatgaactttggtataaaaagtttaaaatcttttttaaaaactatgttttgtggctgatgagatagttcagtggctagaggtatttgcctccaagcctgaagagcaaaacccataggatggaagaagagaatctacttctacaaattgtcatctgaccttcacacacacacacacacacacacacacacacacacacacacactgaaacacacacacaggcaataaatgaagaatgaacaaacaaatgaaaaaataaaataagcaatataaaacattaaaaataaaaaccatatcaccaataagtctaatttaaacatatatgtcataacatacatgtctagtgttcttctcctagttggttatttttgtaccaatatttctttaaactattcactgataagaaatcaaagctttgactaagacaatatcaaccattatactactaaaatttgaaatttttttctttatttacttaaaagataaaatctgacaccaaaaagagagtcctcaccttcttacaaataagctgatttataggaagccaggtcaaggcttggacacttttttcgtaattcaaagttgtatgattaatagcaaatactgaatagtatgaagttgcttacatcaacaaataatgtctatctgctatgtgttaatgtctttaaattagacaatgaatgatttctataaccaaatggagctggaatatgcttgacagcaaactgctctactcagtgaacaggaaaatttaagagtgatgctgccaacatatttaatatgtggatgctggtatgactaatgatgactttctttaaaatataccaataaggctgattttcaattaagacttattttttccttttctttatttaaattagaaacaagcttgttttatatatcgatcagagttcctgctccctccccacttcccctgccccccaccaaccccctatcccatgccgtttctgctccccagggagggtgaggacttccatggggatcttaaaagtctatcatatcatttggagcagggccgaggtcctccccttgtgtctaagctgagagagtatccctctatgtggagtgggctcccaaagtcctttcatgtactagggataaatactgatccactaccagaggccccatagattaaccagacctccaaactgacatcctcattcaggtggtctggatcagtcctatgctggtttcccagatatcagtctgggttccatgagctcccccttgttcaggtaatcttttactgtgggtttctctagcctggtcttgacccctttgctcatcactccaccctctctgcaactggattccaggagttcggctcagtgtttaactgtgggtctctgcttctccttccatcagctactggatgaaggctctaggatggcatatgaggtagtcatcattctcattattggggaagggcatttctaccattgcttagattgttagttggagtcatccatgtagatctctggacatttccctagtgccatatttctctttaaacctataatggctcctgctattatggtatctcttttcttgctctcctcaattcttcctctgactaaatcttcctgctccctcatgtcctcctcttccctcttctctccttctttttctcctaactccttctccccttctcccatgctcccaattagctcaggagatcttgttcctttccccttctctggggaccatatatgtctctcttagggtcctccttgtttcctaattaagccttaatttttaacttattcaaaaaatgatctttttgtgctttctgcttgagcttgtggttctgagaatacttctactgattcaaaaaatcattttgcctctgtttaatttgatctcaaaagactgatgatggctaaaaatgaatatggttctactattgatttttcaatatatgattcataatgaggatgggatgtggaaataactgaagaatctagggttctcttgctccacggcagcataaagcaaagccttttttcttcgggtatttctttgtgtgccagtgcagagtccccatttgttcttcccccaaagaaagatttgtgctggagagaggcagcttaacttcatttgctcccttggccctccaagttggtacgtgcagaaagaaaagacaattctttgatctcagtgaggtgctaatttgtaagatttttgagctgcttgggccttagggaacagggatcagtacataaacaatggcatttatctggcagcctattactgacacattactatctcagtacttactcgtttacactggtgtttgaagacaggactgtgtgtcaataaaggaattagaccagacacctcggtccatcaggtttatctcagtttgctgacaggaacagtaggtgacattaagcaacagaaaacacttcaaagtttcctaggcttggttttgcagtgaagacaaacagcgtttactgctttaccagcaacaaacaatgagcataagtctgctgaaggaagatgaaaggacacaccaaattaccaaggcaaagactgcctagaccctgtgtctagtgattcccccgaatttcaccagagagatttaagggaaaaaaggagattgtaatgataagtaatgtgaagtcaacatctttaaaggaaacattgagtaatgtggaaggaaatgagacagggggaaaaaaaagatggccactcggcagccactgttttgttgttattattattttatttgtttgtttgttttgacaggatctcactatagagcccttcctagcctggaatgcactatgtagtccaacatggcctcaagcttggagtgattctcctgtctctgccactgaaggcccaagggctgggattatagtcatgcatgaccacacccaggcttacaagataatttcaaataatttattttaacatcatttcaacaaatagtcaagatgggcttgctgtctgttagatctatgtaaatatgatggtgatttttagagatactagtgactctgaaaggtacaaggcaaacaacaaaattctcaggtgaacatgagatagtacctaagggtggagggagaagtcttgagtggactgtaataatggcctatatttttggtgtcatgcaaatgggaaaccacttagaaaagacactttctaagatcatcaaatgaaaggtctcaatttgtcaaaatgtttccttttgtcattctatacttcagagtggaattatttacctgtgtttggtttcaggtatgttttacgataattttacttttagtttttgagttatctcactcggtaaatatctattgaatgggtactccatcattcctttcactagtctattctctggaagaataaaaatagactactcttatataggaaggtaaaaaagtaaactgatcttttgagtgacaaaccgtatagaaagtaagtgggacaaaattacttccaagtagggtggacggagatggaaatggtctcatcaaaatgaaacagtattgatagaaagcaatcaggaggcaaaaagagcattatagacagtagaaaaactgatagagcagaaaatactataaataaagaaacaaagctgatttcacccagacttagagacttggagaagaaaacaggacctagtccacactggggacatgggtgactaataccagatggactcaaggagctcttgtggcctccaataacacacatgtctgaggaagttccagagttgtatctgtagcaaccatctttcgtttgaactctgtatttgaacatctggccacctgcttggcaatctaatgtggttctcaaatgagatccattcaaatccaggtttctagtatgttccccaagccctcttcttccctcacatttcctcatgtcaaaatgctaaccctaggctgctacttgatcagaccaaaaacctcagaaacaaccttatttcactctgccccaccaaacagcagcacaacatgggtttggcttacctagttctatcatgtcaccaaaagggtcacagaagagttggtttcccccgcatgccctcactccgttctagtagctcgtgagtctcataaggccaagtcagaggccatctcttctccatccagcagcacactccatcaatgtgatcttgtattcataccctctgtcacctctaactctgccttccctccccaactcgctttacctcttgcccttcctccgcacctgctctttgtgtatcctgggatgctgtcaccctccagcttctcctgcgtgcttcctagagtcctccagtctttactcaaaagacacctcctcggagaggccttccatgaccagcctccctaaagtccccatccaatgtttcccattctccctggatgtctcagtttatattcacatagcattagtcacttcctaccattctgcatcatttcccccttattaaaatgtaagtttgacctgaacctttgtctatctcatttgtggctgtctctccaacaatgaagatagtgcagggagcatagtaagtaaatgataatgtatgccaaattaaaacatgcaggcaattaggaacacttaagagcagggaatggcaaagtctgactgtgccttgagatgggcattctgccttatagaaatacatctgagggatggatatggaattggaaatataagataacatgacagaaagggagagttgcccaagtgagatgcaggtgggtagggctgagcatgttggcagagacagaaataagtaggtgaagccaagcttcgcctgtcagctgacttcataatagttgtggtcaccttataactgggctgtttatatagctttggtgtgcatctttccaactcacagtgcttttctctgtgtacaaaagtcattcaagaatacactgatagatttgagtggtccagaagaaggttgaggaaatgatctgggatacatgctagatttttttttaacttaaataggtgtgtgaaagcaatttactaaaaagaggatgagcaaggagagagagagataattttaggaactgtttcttctgggatgcctcttagataccacagggcaaacaagaatgggactagttatatatttataaatatgtatgacttacataaaatatttattatatatgtcctataatggagatgtcaactgtgaagattaaaattgagacattatcatatgcagttaacttttttaaaaataggtttttaattaaaataaaattacatatactttcctctccctttccttcctccagttcctcctccctatcctcccccaaactcctcccatgtccaccccttactcaagttgatagtctctttttcttttattattattgttatatacatatatttggagatatatatatatatatatatatatatatatatatatatatattcagtctgttgagtctgattttgtcaatggtgtgcatatggcttcaagcataactacgctgtgttaggtaaccaataagggggctcattcctagaagaggctaattctccctcttccagcagtcactagttgcctatagtttttttttttttatctaggaatacaatcctactaaattcccccctcccacattatcatgtccttgtcattgctgttgttatgtcttgtttacgcagctatttctaggacagactattttcatagcagacttctggattttacagtctttccagctccttctataagatactctctgaaccacagatatgggagctgtggtataggtgtatccattggggttgggcacctcacaatctgttcttctctctattgtatttagttgtggttttctttgatggtctccatttgctagagacttctttgatgaggggtggtaattacactgacctgtaggaagagggatacgatttggaatgtaattagaaatctactactgagaggtagtgatagtagactcttttttaagatcatgacctcactagccccaggaagctggctaggtttccagtctgagacacggtcttcctcctgttgaatgggcctttaagtccaattagacagctgttggctgccaccagcatgtgagtgccactttatatatatcttgctatgctggtaattatcatgcttcacaggttttgcagctggatagggttgtttaattgcttcccacccttggtagtttgcgtagtaatttctggtgtcaaagtaaggtgagtgatcttttaggtttgggaattagcatacttttcaaatggtcttatacagtatacactgaaacactggtaatgtaccataatcatgtttcccactgtgtttgtatgtttgcgtgtatatgtgtgtgttaaactatacccaacattcttactggttttaccattttaagattatatcttaacagtactaaatatgttcacactgttttacaacaaatcattattatttggggatgttaaatccattaataaaacaactctccattctccactccactttgggcagcctccattttgttttctgtccctaagtatctaactattctaggtacttgctgtaaatggaaccagatggtgtttgtctttcttatgccaggcttatgtcataagcatatcttctaggctggcatatccatgttataacaatggttcatccttttgtaaggatggagcagtttcccattacgtgtatgcactatgaattgtttaacctatccttccactagtagacacgagctatttcacctcctgactactgagaatgttttcaaacatgtgtgattcattagtggatgaagtcacctttctgtaaggagcattcagtcagtctagggagcagaatgtgcagaagatgcatatttcttgcctctttgacttaagatcaggaggtcctcagctagactaaccattctgagactttgttttgaggaaagagaaaggggtctaccactaagaaataggtgcttgggctgagtggagtacctgtcttcaacatgttcccgagaagagccttctaataaatatgtcctgagcacatggcaggagactgcaaaactgggctaaagtgctcaggaaagaacagattttaaatttttgtagctataatatgctttataggcaaaactttatataccaaatttatgaaccaattccagatgaagcattcttgagactaaaaaaaggggggcagtgagtcttgcctcctctgcttattaaaaacatgacttgtgattcgaaccagtgaactaccctgagtctccatttcatttctccaaggcaggaataataatgatacctaccctgaaagcttattagaatagtgactatgttgttacatactcagcaaatggtaattgtttttctaccgtggtttctgtgagcattaataatagaggctgaagagaaagctaagaaaaattttcctttcacatgagaacatacaagttattaatatgaaagacaaatactaatattttagttcaaactgatgttgtagcgctgtgtgtgtatgtgtgtgtgtgtgtgtgtgtgtgtgtgtgtgtgtgtgtgtgtaaatgctgtctctgtgactctatagtgttccctttcatatatttcaatgtcaatacagagtagtatccatttccttaaaaacacacagtttagttatagacaaagaagattctcaaaatgggtcccagtgaagtacatatagaatcccttagctcctaatctcttagtttagaactgcacattgtctagtttgcttggggaggctggtggtactagagattcaacctatagccgtgtatattctagacaagtgttctgccactgagttgtatccgcaggtctaattcagagtaatctaagagataggtacacacaattctgagatgagattccctgcacctactctgaacctcatctccaatgtctcctcaccaccaatgcctccattcatctaattaaacagaaaagcaaggatcattcctcccacctttctgaaaatggggattattcttgtaaggaacactggtgcatacaatctaagttccacaattataacatattcaccataagaacagaaagggaaagctaccgagatgaagggtaatctctggcccctaggagccatttgaagttatccaaaatatggaaaggaaggaatgggacttcagaaatacaagtttgttgacatacataggttaaatacaagcatgtggtctgagagtgtgttgagacacaataatgaacagctaaagtcccattcagagttgggaagttttaggggagaacaaggaccatagcattatgtaatatttattgacacttaatcttacaagtattagtatatattattcaccacaactgtgttggattgttactctctatttattattttcaggtaccaagaattagttcttgttcagcatcacataaacagccaagaaataaacctcacgtagtttaatcaagagtgcattgattttattgcatgcatacagtaaatatcgcagctaaggacagtgagtgttggagcagaaaagatgcatttaagtgggtgtactggaaaagtatccagaaggtccacgtttatatagggctttgaaaatggggtacgatctggctgagggagagaaagttggggcaacaaataaagactggttacagaaaaggaatgaccaagacaccagtactgccctgttctgttggatgaaagattgttgatgaagaagaggaaagctgcatcagggaagactgaaaaatgcaagattcagtcattattttatttggtacataggagcaaccaatgaaaaaaattcaacaaaaaggactgatttagggtggccctttaagaagattaagctgtagttgtttacacataggattggtggcgaaacaggcagacaaggaaaagttagggtagtgttgataaaatctcatcaaaatgagataaatgcttaagatagaggattgtgaatggaggcagaaaagagagatgaagggtacaaactttagatacagacacaatagaactgaacaaagagcagattatagaagatgacgataacatttcgtgaaagattttgaagtaagccttcaaagatgtacttaatttttattaggttaaaaaaaggggaaaagacaaaccttcttagtgggaaaaataagcaaatatttggtttttgtctttccccagctgtccttagaatgctcggcctacagaattctgcaccagccctaattcaatgatgtttttattccatgttttcttttattaaaatcagaagtctttcaaaaagactactgttcagaatttttaaggcattaggaatattcaagtttccttttcttgtattgccactgttgaaaactgaatgaaatcagataattatggataatatttatcctgaagagcttgttgaaagcatctttgtgtgcataaaatttctttgtatgcataaaagtgagaaaacagtcacacagtagccacctcacaagtccatattaaagctattttatgtgcctcacattttaataatgtctcttccttgtggttagtgagcactcattgcctttaatttgtggacactttctaattatcacttgtggatcttcagggagcaaataccttcacagaaatatctgtttgccaccatgaagatcatcaggacaaagagatgattcaatatttattctgtatttaataacatcatttgagcaggcctgaagaaagtaaaaccaaagagagaaaaaaagagcccccctgtattctgctagagttctttggaatggaacataacactaatcctagtacataaagtctaggaagtagttcactgtacttgacaaagtcacagcatggaatgtggaattctagaaaaataaaataccaagacctttgcgttgacatcatctgatatggtctttcttcagcagttactgactggcctgacagatcctgaccttcctaggcacagaacacagaaactccatctgtctgaattttagttcatcagtaggcaaactgaagaaagtcacaccagattaacttgtatctaccacaaggtactgtgaaaatgcttaaaagattgcagtgcattatacactggtaagatattgtttccttaaaatgaaaacaacaatattgtttctttcatgttttgcatggatattgtaaaggttgacaaagcaatgcctacgaagaacaactgcaaagaaaaaaatctacacgggaaagacaccattatttatcactgatattagtttcattaacttataataacacttctggaaatgtatctgtttgtcaattgttgggaaacttttttctcatgagcccaagtgctagcttgataatcttctcatacaaatagaaggcttaagttgagaaagatgacacgtaaacaagtagagggtcaaccttaattgtggcttcagctttatctataaaaggggtatttaatcacaatggtttcttacctcgaagttttgagggtgtcttgttttgttttcatggaagcctaagactcagatttcacccctgaacttgggaaaggtttgctgcttcaaactgtagtgtccctttgaatctgatgaatattcagatatttactactaagggcaaacctttcttctgcactttgccctgtaaagtgctctgtccttttccctaccagtggaagcagcataggtgccaagaaaggcacttaaaccaaagcaaggtgaaatcatcagggagagaaagaactaattctccccatgttatctgttgatttttctattcctagattgtgtgtgtgtgtgtgtgtgtgtgtgtgtgtgtgtgtgtgtgtgtgtgtgtgtggtatggtgtgtcttgacaaatttggcagctgattaatattcagatcaagacattaacactccagtcaaaaatattagtgtttccccttgtgttctgagttgacttgctttaaaaaaattaacaaagagtaagtttaaaaactcttaagattaatacagagaataagtagacttaaattagatttaagcactgattgcacaggaagggtccatacaatccattctgttcacactcttttaacagtgatagaacaggcacgcagatgtgtgtcacaaagatgtcttatgagaagaggcgtcaggcagaggcctaggtccctctcaaaagtgccagtactttgcttctgtctcttcatttaagactctactgaggaacagaagtaattggaagccctacggtcagaagaaagcagcatactctatttgaacagaacctagagatgaccctgtagcatctagaaaaaaaaacttgagctacccacaatcccctgtcagtaggctgtggtccaatggcatccaggagcagccagggaatggtgaaagggattagaagcagcctcagctgaggatcagaagtcttaaagttgaaaaaagaatagcagagaaatctcaacatcagtcagtgggcaccaaatatgtcatagcattggtggactaaaactggtctctattagatgtagcatagtatactccctgcttcccaccaaatgctttggtgatatagacccccccctgtctctctctctctctctctctctctctctctctctctctctctctctctctctctctctcttgctctcgctctctcctcccctctctctatgtgcagccttgtgagtggggagcaaaacttactgagaccagatttcataaggagaaaacaaagatgattctcaaactaaagaaggaagcgtgtaagacctgaaatttgtggcaatgttttccaaccccctttccagttcttaattcctcttgggtcttgatttgctgctgctggctctcaggttcttgctctatattacaggtccgtgtagcccaagcagcagcatgctccctgtggactctagggaaggggcaggtggtttctgaagccatccttgtgtgctatttaaccccaaaccactccctttgtttgaagtggtcagtttaaaccacactatttcaaaaggtccacatcatacagcttgaccacacagcctgattgaactttgataatagcatcagtaatcagaatactgcattgatatgtctgctggcatgttatcatttgtatctcttgaacacgtccccccaaattactttgattaatcctttgaggtccatcatgaggggagtctgcaatttattactctctcgtcttcctgcaattgtcaagcctcagtggaacacaagcatattgctcagttcttctgagatacaggagagatctgaacgtgtgtgtgtgtgtgtgtgtgtgtgtgtgtgtgtgtgtgtgtgtgtgtgtagacaaatatcgaaaacggtaagaataaaggaaatcttactctcgccctgtgtgataaagaccaccatcccacttaagcatgcaagaacagaaaataaatctagagagattaatctaatctaaatactcatttttcaagttcccacccatgtcttccttctcttgctcccattggtcatcactttagcacaggagttggaaaaccagctgcttgtaaagggcaagatagtaaatatttcagactttgccgggcatgaggtctcagctgcaagcacttagctctgtatttgaagcttgtaagcagtcagagacagtgcgtaagtgaatgggtgtggcagcgttccaataaaactttattcatgggtattgaaatttgaatttcgtatcatttccatgtgtcacaaaatattcttttgattcttttcaactatctaaaagtgaagacaccatgctgagcttagagggtgaatgaaaacagcaagcaagatgggtttggctttgcaggccacagtttgcagctctctgctttgacaccaccagggtataaagaatcagcgtcactttcttggcactgggggaaaaaaacacaactgttaaacaacttcagtttgacaactccctctggccacagccagacaccatgtacgaggaggagttttcattcagccttcaaatgcttccatatctaagccgggagggtgcggggggggggcgggggggagcgtctctgaggcaacagaaaaccttcccaggagctcaccggctacacttgtgttctttggtgtcccagacaccagatctgattatgaccgcacaactcctagtcatccatgccaatttgctttggccatctaaaaaaagctgcctccgcctgtctctgtgggtaaattcagtagtggaaatagtcaggccgttgctctctggaaacaaacccagagggaactttttgggcagtggggtccttgccgagtgccaaaccacagctacgaaggggatgcgcagggaggtgtctgctgcagcccagggacagcagctggagaaggatgtcagccagctatgaagaggccaggccccagcagaatgagctgctggcgtcctgtcctttctaacttgaaggcgccataagaacccggctctgtgactgccactgatcacacattcctccctcggtaacccactcagctgtccactctgacaccagcctattctaattagaataaaagagggctcaagatgctggactgtacttcttctccttggcccaggatgatgaagtgtttgtcttctccaaataggaattttcccatataatactccagacatcaatagtcattcatttcgagccaagaattttcctccgcttcttgtgttctcttacttcttccttgtgctctcagactgttccagagacctatgtgggcactcgccttttgcattattttaatttgtaaaacaattttggtttggggtaaagacgatgggagtaaacacagtgatttgcaatccttgaattgcctattcattgccctgtactaaaaactgtgttggatatagataatagctagcaattcaataatagcaatcaatcacatgattaagaaccaatagcacttactggacacttagcctttatgaagaaatgaaaaaaggtcacggaaactgaaggcatgtatttgctttaaaagctatttgttgtaaaatattgtaggatctgtaaaaaaaaaaaaaaaaacaatgtgctattcatgctatggtagaacttcccatagtgtgtgtgtgtgtgtgtgtgtgtgtgtgtacatacatacacatgtaatatatatatatatatatatatatatatatagttacataatattcttatggtctagcaagtttactttgaggacatacccctccaagaagcaaatgtaggggccttcagagatattctcatacccatgtttattgcactattttttgcaataggcataaggtagaaaaaatccaagagcggatctatttataaataaatgaatcatttgttacgcacacattataaaatattacttttaaaaaggaggagattatgacacattctacattacaggtgaacttggtggtattaagctatgtgaaataagtgagctacaaaaagaaatctttgtatgatcccatttgtatgaggtaccttgaatagcaaaattcagtgatagaaagtagaccactggctgccaagggtgaaggaaaacaagaaagggtatttgtctttagtgggtgtgccttcttccacagcaaagaagaggtgatgaacaccatgaacttactcattgtcctggagttacactctaaaaatggttaaaatgataaattcatgttatgtgtatttcactacaagttcaaatggaaaactgagtgtattagttttgcctgcctcttcttattcttggagtctgccctgtttttcatgtgtggatggagcctccgccaggggcccacactgcgcagcagcccagatgcaatacacgtgccccatgaaagggtcatgctccacagtgtgtttttgtttttgtgttttatattaacttcataagaagggctttgcttctaggcaacctcactcccactggaatctgcttccttgaaatggaaagttctaccatagcatgaatagcacattttgtatttgctccctgaaatgttgtaagccacagtttaaccagcaaacaatggtagaggccaaagaaattacccttgggcgaatggtctgctgaacagtacaccctcacttctgccttcagtgttttgcatggacttccattccctgcactgttaaagggacaaacattgacaaagctcaggataggatggatctgtcaaatggggccttaatgatcagaaagtgcataagcaaagcaatccctggaggaaatgatgcaattcccttcactctttatgaagtgtttttttatcatctgtcttgtagattacccagtagtaaaaagaggaccactttgctgctaacacaactgctggggcatgactaagctcatcactcagtgtggtggtcaaacagacccggaagtcagtttgcctgtgctctcagttaccactgactgtatgccttcctccacccctcccccatcctgcagccagcttccatagtcctagcatccttctgtgcaaatagggatggagctaatgctatctactccataaggctggtgtacacaagtgcatatttgtgaggtgcttagaacagagttggttaggcatgtagtgtgaacctagctattccgtattaaccccagcacaaagaaacagatttccagggctgatgtaagtgtatgatggtaacatgatagaaagagaacttacatgaataaagtaattaaatattggctcaggtccagccatttatgtactgtaagactttgggcaattcatttgaatgtcttactgtttaggttcagaaagataggaaactgcccttctcagccttgtaatgtgtgattatatgcatgtggattgttaagctatacagtctctgttagaattattataacagagctggggaagatagttcaatggataaaatacttgctgaacatgggtgaggacctgatttcaaatccccagaacccatgtaaagctgacttagtagcacacatctatagatgtttacaaagtagagtcagagatagttgataatcggtagtttattggggaaaagtactcatgcaagagagccagtgaccagatttgcacctgagcaggatggacccagaatgcttcccagtcagcccagccaggcgaaagagagccacatgggcgcctccctccttcttaaacccttgttacataactctgaccatgtcagcagtacctgtgaccaggcccaagcgggtgtggtcagcagtacctccaatcgggatttctccctacacacatctgtaatgccagtgattctaaggcaagatgagaggcagacaggccaaaattcgtgggccagccagctcagcatatacagcaatgaacaagaaagggaccctgtcacaaataaggcataaggcaagaatgacactagaggttgtcctctgaccacatacacaccatagcatatactcacccgcactcacatacatgaatgtacagggggaggtatgcatacataatacacatatacaatacaatatatatgtatccatataaatatatgcaatgattgtagcttccatctttgctcctttcatatccatatctgagtgaaagcagaaaagactttttttattttaaaaaatggtcattttagattgggaagatggcaatcagtaatatacttgccacagaagcatgaggatctgaattcggatcttcaatatccatagaagaactaggcatcgaagtgagcatctgtggccccagttctgagaaatcgagacaggatgtacaggaccggccggacagcctgtctagttggagcaatgcattccaggttcagttagtgaccttgtctgagaaaataaagtggaaaatgattgacacctcctgtgtctggcgtccacatgtatgtgcatacatgtgtatgtgtatctaaatcaacacgtgaacttgtatacacaaatatatcacacacacaggttactttaaatgatatttgtaaagtatgcttaatgtaaaaaaacaacggacaataattaaaatactaaattccatcattttatcccttagtaaaaaatcactattagcctttcctgtttcttaattactataagataagaactttttaacatttttttcttctctggggcaagatccaagttagaaaggcctatgtatagaaattttaaataaacttgatatttcagtgtttaattttatttcaaacattgaagacattttcaatctcactctttattgctacaggaagaatgttataataaactgattatttttgcagtgccatttaagaactttcaaagatacatgggattctattaccccactaaataaaaggcccttaatttatttatatatataaatatataaatatatagatagatagagagagagggggagagggagagagagaggaagaagaagaagaagaagaagaagaagaagaagaagaagaagaagaagaagaagaagaagaaaacaatgagttgctaagtcctacaatatttgcacaaatggctctgacagtttgcaatgtgggaatttttttaaagttagggagtttccttatgtggaagtcaacaagccaaatcaagttctagttctgaagaactaatcagtttgtagcaggaatgaagactccacagcttcatagaggcaatagcacagctctgttccccatttaaatggccattcttggaacaccttggaaataagaagcttgtaagacactcgtgacttcttgcccttcccatatacatcatgctgccttttcttggaaaaagtgccatctcatcctgaatgtcatttgttgtgtttaatcatcccatcctttctttattccttccccattttatactccctattcttcttaagactgtttgtacatgcatgtgtgggtgtctgagtatacacatgtgcctgtataggccagaagagggcattagatcattggaactggaattatggatggttgggaactacccgatgtggatgctgagacctaaacccaggacctctgcaagagcagcaagtgcccatgactgctgaccttctctccagccctcgaccattctgtgttttttgaatgtcacaggtgttttatactcacttcatttctctatgataagtataagctttgcacatttgtaggagtcattgtttgttggtacttttaaaattgaaaatgttcctgataattgcaagatgtctttgggtgaagtagtaaaggaaagtatcctcttggtgtctctggcttgggaggtagattgaaaggttcccttggcagggatggaagagagggtagaagttggaagtcttgtggaagcccattcagtgccttagatgtgactaagagcaaatgcttttcacccaaacatacacctttcagacaagcagcatattgagagctgggaatgggggttctttctaacttgaatcttaaactcatgcaatgggctgacatatgtctctgagaatcttctggttgcacatggaaaacaaagaaaccttttttgctttctcggcaccatctcccgcactctcttgcttagctcatttggaacctttaagacaaacaaaattaagaactcagcagtcaaaggactagtgggtggtagagcagttggaagcactggaaagggctaagtatttgttttattttctctgagctcattacttactctgagtaggttagttagccaggaggggaagacaaacactatttagttaataagtcccataagaatccagcaggctgtcttctctggtttaacattatatggttggacaaagcacaatatcccctttgcctgtacctttcatctgaccagctttgaagttgatggtttacagtgtggatgagtggtgtgagcttgatttccacagctttctgaggttaaaaatgtgtgggagacatgtctttgggaaaaggaacattatttcagcctcatcactaactgcaattttagatcaaataggatgttgtctggctcaatatttgcattccgaagctgatattctatacctattactctacttttggtgagccaaattgatcctcttgattcattcaccagctatgaattctatcctttatgagacgcttaaatacaatactgggctagatgtgctctccacactaggctgggcactgctaccctttggtcaatgcaggttaaaaacaaatgtaaacgtctgctttaatcaacattaaacagcacatgagggtatagtagagtagaaagaacaaggagaaagaatgagaagttagggatggaagagactggttggttttcatttaaaatttttaacaataatttcaaaacaaaggccataaaattcattggtaattcacaagttttaaaagcaagttctgtgataccacaaaaggaattactgtacttgttgcctataaggcacagtaacttgaaaattggtggcttttgccgagccttctgtatcccttgtccttagcactattgaccacataccttggtaagggttagattctagtcaagaaatcattcagcagaaatgtctcatccatgctaacatctttgtgagtgaatttaatatatattcacctccatagccacaccatatttctactaattgcagtggattctaaaggaatcctttttttaatcttttatatatttgagttacaaacaagattgaattacatgacgatccagttcccttctccctcccttcctcccctaccaccctcccaactaaaatcctgcccatcatatgtcctttcttctaatctacacctgactcaacctttctgcttcctcatgacctctgcatccttccttttcttcccttctcattctcataaggaatctttttataactctaaaatttttgtgatgactgtttcaccaattacatagttgataggaagactctgatctccaaaaactagtagacattggtatcttaggagaagtacatgaaaccgtacaaaaaagttgataattcttattcttccaatttgaatatactacccaataaccaaagttaatgagatgcatcatttggagagtatggatggattgctgtggataataattatgcttcctggaggatataataccttctctttgaacgcaatccttctaaaagttgattgatattgatgaaaaatatcacaatacccatatttttttgccccatagtgtaaaaatcttgcagttggatctcagttaagtagttgcagcacaaattctaataggtctttaaccaagaaggaaaacacacaatcccttatattacagagcaaggtgacaggacccagaagactacatgaaagttcttggagcaccagttaccattaggcattccctgaacaaacaagagtcaaagttttgctacttatggacaacttggagctattacagatgagtgtgggaacatgcaagtcctatttaaggcctagaaaagttatacgcataccccgtttgtggctgagaattccactgatatttattctctgcactttgatcagttttgagttcctgtgttacccactcatcgactgcacaaagaaatttctctgatggggtctgatggctactctaacttatgggtctaaagatgtgaagttagagtgcagtttgatacactggtcatttagtctgtgagatccccagctatgggttcttgttcagatttatagtaccaggcttgtggtgtttcttactgtggattgggccttaaatccaattagcaagtagtggtttctcccataatatttatgccactacaatgcacatgagcattgcactatgtagtaaaaattgtatggggttctgagctggtaggactgttaatgacatttgccccagcaggtattatggtaccttccagtactataaacactaccaaaagagaggaatcttcctgaaaatgttattttctaaactacaaaaaaattaatgtccagcataaactgtcattggtgtttttgattttagctattctgacaagagcaagatggtatctcagagttgttttgatttgcatttccctgatggctaagaatgtcgagcactttcttaagtgtctttcagccatcttggattcctctattgagaattctttatttagttctgtaccccactttttaattggattatttgctgttttggtgactagtttcttgagttttttgtatattttggaaatcagccctctgtcagatgtgggattggtgaatacctttttccattctgtgggctgccattttatcgtgctgacagtgtcctttgcctctcagtttcaggaggtcccatttattaattgtcaatctcagtgtctgtgctactagtgtaatgttcaggaagctggctcctgtaccaattcattcaaggatacctcctactttctcttctaagaggttcagtgtggctgaatttatgttgaggtctttgatccatttgggcttcagttttgtgcatggcaatatatatggatctatcttcagtcttctacatgccagcatccagttatgccagcaccatttgtcgaagatgctttcttttttccattgtataattttaggttctttgtcaaagtcaggtattcaaaggtgtatgggtccatatcagggttttcaatttcattcctttgctttacctgtctatttttgacagtttatgctttagaggatgtggagaaaggggtacactcttccattgctggtgggagtgccaactcgcacagccactttggaaatcagtatggagattcctcaggaaaatgggatcagtctaccacaagatccaacaattccacttttaggcatatacccaaaagatgcacattcatacaacaaggacatctgctcaacgatgttcatagcagcattatttgtaatatcaagaatcttgaagcaacctagatgcccctcaactgaagaatggatacagaaaatgtggtacatttacacaatggagtattactcagcagggggaaaaaagctaatggaatcttgaaattcgaggcaaatgggtggaactagaagaaagcatcctgagtgaggtaacccagtcacaaaaagacaaacattgtatgtactcactcatatatggatttcagacataaagcaaagaattaccagcctacaatccacaccaccagaaaagccaagaaacaaagaggaccctaagagagacataaatggtcccctggagaaggggaaagggacaagatctcctgagctaattggggagagagagttaggagaaagagagagaagggggagaagaggatgggagaagagaacatgagggaacaggaacattgagtcaggggaagaacagaggagagcaaacaaagagataacatatagagagagccttataggtttaaagtgaaatatggcactagggaaatgtccagagatctacaagagtgaccccaactaacaatctgagcaatggtagacaggctactttaaatatccttctttgataatgagattgatgactagagctttcatccagcagctgatggaagcccaagcagacacccacagctaaacactgagccgaattcttggaatccagttgcagagagggaggaatgatgagcaaaggggtcaagacaaggctggagaaacccacagaaacagctgacctgaacatgggggagatcatggaccccagactgatagctgagaaaccagcatgggactgactcagaccccctgaatgtgggtgtcagttagcaggcctgggcaatctatgggacctctggtagtggaacagtatttatcccttgtatactaatggactttgggagcctattccacatagagggatactctctcagcctagatccatgggggagggcctaggccctgctccaaatggtatgacagactttgaagatcccccatggaaggtcttgccctccctggggagcaaaaaagggatgggatagggctcggtggtgggcaggggaggaggggagggaaagggaattgggattgacatgtaaaacaagcttgtttctaatttaaattttaaaaacacaaaaaattaatgtctagtgaaaagataccaaaacaaatcactgaaagattaaaaattctggttttccaggatggatagaatagtaggatggtatctgttatcaaaggttttcttatcttggcataagaaataaggttactaaatttctaattggtccctactatgtcagatgtataacattttgtttctcttacacattttgataagtaaattttaataggacccaatcttaaagaaaagttgtaaaaactgcaaaaaaaaatccacattgccctatactcattccaatttaaatatttgtccatttccctagtaatatcctagcaaaacgtccatcaagagttagtgctttgtatggttttctagtctctttcagtgtggaaaagctcttcagaatctccttcactttcacaacctccatgtcatttatttcaagccatctcacgaccttgtgaagtagctcagactcacagtcttccatgccagcctcaactggtgacattcctgtctctgctcccctaaagctgaatttgcagagggtgtactgccgtgcacaactgacttgattttgccttgacagccataagtcagttgtgtagacttgatgtccttaaagctaggtgtgttgtgtgtgatgctgggtctctgtgactaacacatgatattgttattagtgttgcctataatcactttgctagtggatgatatttcccaggtttcttcatgtaaatctcttctgtccctttttaagcaaaaaaaaaaaaaaaattgtgatgactgatactggaaaccatacaaaatcgcatttctttcttcatgctcatctgccagttgtggcatcactgatgagtctttctgagttattgttttaatagttaacaaacagtggctcttctaccattgcagttttatgccaacttcctatgacaagggaagaatattcaaattcacttacacattcattcctttgctttatttatttgtttgctgtgtgtgtgtgtatgtgtgtgtgtacgcacacatgcttgcacacacagaggccaaagaaggatgccagctgttttattattaataatcactccccacattatttctcaaaacagggtctctcactgaacctcaagctaggctggaagccagcaagcccaaacaattttcctgtgtctaccgttcctcccacaatgaaggatttacacaaaagtgcccaatacctagcttttaaatgcatgccagggatttgaactcaggtccttatgcaccaatgacttgagcagtctctccagagcctgtttgcctgttcttgagtctaagtctcactcagtaggccaggctggcctagaattcactctgtgggcttgaacttgtggtcattttcttgctttccaagtgttgaaattcatgctttcatccttgtatacatatattgggttctatccctgtgggctcacaggttccagtgtattctagtcttctactgccacattttatttgatgctcaaaggcaggcctctcaatttaacctctctgttctttgagagggtgactttctctcagtctatccttttgctctggtaaatggaaagttctgggatcaggaatggtgcataacccacaatcctagtgcctgagaggctcagatcaaaggatcactagttcaaggtcagtttgggtacatggtgaggccctttcttaaaaataaagaaaaccagagccccatcgtgctcccttcccagcatgggcttaggatggccattcttctagtgcactccagttccttttattagagagtgatgcttgcaacgaagtcctgggtactaaatgtgaacgtggtggtgattttgctgttcttagagttttacagggcatcaagctaggagatgatagatgatagatagatagatagataagatagatagatagatagatagatagatagatgagaagcaaatgggcaaatgatacataattgtatagtatagttactatataagtttatataacatatgtatgattagatgtacaatgtagacttatttgtgtgtatgtctcatctataagatgctgaacatctaatgatgccttgaattctaatccaaggccaagggatttgttcttgctccctcctctccactttcatgcttcactcgtctgacagcaaagaacctggctttcattacctcagactcccaagtgtcatcaattttctgataccccctagccactgcccactttgtgtatggactcagaaaggtaagatttaacaaccttgggccatacacttcaattagtgtttcctaattgctttttttggtaactgtgaaatggacaataaatacttaaataggttaagagaatggaggaaaatgaaaataaaagaaggaaaaagtcacatctattactatgcttccctttgttgtgagctttatgagagctgcacaggggttgcactgatgttcaggaacacacagccatcacttgattgaactaacctcaggctgcagccctgataggttacagcctttcatctgcactcaccactatctacactgcactcttaatacatcccttcattaggctccaagctcacccagtagaaattgcttagcacctaactgaaaaagagtttactccaagtgctagaactaatgtaaacagggaattacattcttgcagctccatgtggtgttataattacatcagaatgcagcctggtcactggtgcgtcctacgcgccacactgtcgccatatttgcagatgttcagtcttacgtttattaagcatgacaatacccagcaggatccattttgtctgattatcctcaaatggagaagaatattaaaaggcaggataattaaaaatatatgcccaaacaaaggatgtgtctacaattccttttctagtgctttgaaatagttcaaatttctcagctggctctcgtgcacagagcattaaaaggatgtcttaaatttagacatatgtcttcattctgtttaatgtgccagaacaaaaacatagcttgagaccaccatgaattgatgtctaagtgctggaacgctagagaacactcttatttccacagggctaaatgtcatcatagagtttgtgactgcactttcccctgtgaaaacatacccttctatttttgagtttgactcttacaattccatgccaatattgctggttaagtccacataatggttctcttttattggatgcaagttcaaagaattaaaatgttactgccgttatcagggacgcctttattaaaaggaagaacctcatctcttccaaacaaggtgacaacctaaaatatttttttaaagatttattttgttatttttaattgtgtatgcatgttggggaatgtgaatgtgagtacaggtgtccacagaagtcagcggcatgggattccctccagctagggattcaggcagttgtaagtgcttcgaactcagtgtgggtgctgggaactaaatttgggccttctgcagggagagtcagcacacttaactactaggtcttctctccagcccctccaaaatatgttcaaatgtttaaaaatgtttgcagggtatactcggtgtttttaggttttagtgcatttaaaatattcctaaagagagaaaataaacatatatatagtgggttggtcattgggactttgatgaaaaatagtgtggcagaaaggaggttgaagaggccatcctagtagtcccactctgatgtaaaataatagttaaataaccggtatttactttaacatttttgaagaagatcatatttgagggtgtcaacatctaagggtggccaaaggacgtattacatatttataggtggaatttgtggagatgtgaaggtaattttaaagtaaggaaaagtgtctcctatcttgaagatgaggcgatccacctcataagatgggcggtctcctcatagagctcttggatctatattatcacatatctaaaagcaatgcttctcaaaattgaatgtgcttatgtagatggtttggattatttaaaaatcagattctgcccagcactcaggaagcagaggcaggcggatctctgtgagtttgaggccagcctagactacagagtgagttccaggacaatctccaaagcaatacagagaaaccctgtctcgaaaaacaaaaccaaaaatcagattctgattttatagatctggaagtaggaacttgtgatttccctagtttcgatgcaaattgttagagcgcaggacactctgaatatcaaagacagagaaaattaaaacatataccattgtagaatgttgggacagcactggttttatataaattgagaaggggagggagaggaaaatctaaaatgcataatactgtggctgaagtcccagaaataaactggatagcaacaaacagagacatacaccttatggggaaacatacctaggatcaaaagagtcccaaagccaggtggaaagcacccacgagggaactggttacaatggaaacaatactgagcatggcagagcttaaagggattctccaaaaggcccatatagctattaatttgtcataatagaaacccagccgggcggtggtggcgcaagcctttaatcccagcactcgggaggcagaggcaggtggatctctgtgagttcgagaccagtctggtctacaagagctagttccaggacagcctccaaagccacagagaaaccctgtctcaaaaaaccaaaaaaaaaaaagaaaagaaactcaggtaggcaggtttttccagacaactgacagccctaaaatatccaatcaagaagttagtaagatcctgctgatgaagggttccatctttcctgggtacttgtctatcacaggtggtccaagcttaaactccatacagcttttcaaactatgaattttttctctcttgcaggaaaggctcttcttctccctcaaagttggtttcaggaatgaaaagacttaggaacatacacacctttgattaaaagcaaaggtttctgtagttccgtatcaccaagggtgcaaaaggtgaccatttagacgtgtcaataagggctcttcccacaatttagcgtgtatcccaatagggatacctgcattcataagtgcgctattctttattattctaattttgagttcatatggatcttcacgaagctgtatgttaactttaaagggaagactaactcattaggtcagggtttttccaatccctggtgtcccattgaggtagaagtcagacatctggtctgtccatctccctttgatccttccccacccctccacccctgcatttcctttaaagtagcgtttttgcttcaattgtcctattaaaaccactgaggagtttttattggaagaaagtgataagacgccaagaaaggctatgtagcttccttaaaccacggtgtttacagggaggcaacactgacaaatttggtgccatctctttcttactaactagattcaaactgatagcaacactagctatttggcttctttgattttaatcagcaaatgggtcataaaaatatcagctagttctgggttatatgtcaaagttctatttagccagtgtagataagtatttaatgcatatggagagagttcagaaaaaaagtggtgatgttttgtaaggcttcaagaaggggggaagaattgaggaaaaaccaattaaggggaaaactcacattgagaacaattttatctatttagaaatatgttcagaattaatgtgattgccgtagaaagtttgtaagatcaaaaaacatgattgcacataaaacaataaaccaagaagataaccccaccaccaccaccaccaccaccaaagccacccactcataagcttccatgttaacgaaatcctttatcagggattatgtttgtatgtaagatgaaaaaatgaagaacaaaggtttattatttagcaaaggtgatatggattatttataaggaaaaaaaagcctcctgaaaaacatcccctgtgtttgtttattgtcagtgagaaataaattttatgagcttaggattaaaataaatgatacaagctttgccaatgggaaaatgacaaaaagactacaaaaatactctcgatgaagttgtatattttgaaatattgttagcagtctggcactgtttccgtacatatgtctgtctttctacaccaacagcaaaggccgtagacctgagtgagcgtggatccctttcacttaatcttacactttcatttcagtttgtgagaatcataaattagcaagggcgaaatgccctctctcgctttcaggtgtgatatgacagctactcagcacaaggttcagagcaggctcttcaccttcactggagaggttttccctcttctctcaccccaactgtttccattttaacatgtgactctactcagtacaatacagccctctggccctcagcaaatctgctgatgcaaagtgaagagggcaagaatgtgtgaataattaggctggcaaagactttcattttctagagacccccctttataaaaatactcactttcaagcgttaggctttgtgcctaagttcaaaggatgtgatatgtagtctttaaaatgcttaaacccattgtcttttctaaaactaactttgtgaattgtgtacattatctatgattatagagcacatagctattttagacctttttatcattatagctggtttaaaatgagatgatgcagctccatatattaaagctaagcttgagatccatctggatgctatttagttgtatggtaaaatgtgcttgtgacctcctttatattttagagccagctagcaaagagacacatacaaaatggtaggtggtccagttaaaacagtgaggtaattatagcactctaatgggtgaaaaatgttcattcttatatggttaaaacatgtatggatcaccatgtagaaagcttccagggatgtgtttgggactgtgaaaacaatttcggagtcctataatagacaggagaaatgaaggcagatgcagattcttgaatcttaggtggcttgtaatctaatcgggacctgagccagccggagcaaaagtgattgccagtactaactagcagatagggagtgatgcgattcagataggattgatgtgtcataagaagtgtttgagattagtatgtcgtattgaatcagggatgttggctgggaaaataaagctatatctgttttgggtattgtagccagatagtgaaggggaaaattaaggaaaaatctgtttccacttaactcagacaaatagagggtttaacatgactgatgcaaacaagagaagtaccttccctctgatgcaccattacttgagaaaccattaagctcatcttcagttctgattttttttttcttccctgaaggatagagttaggtgagaaggttcccaacacagtatttactccaagctgcttcttcaaggcattggaccctcagctgtattctgatgagtttagggatgaaagaatccctggagacttaactgctgctaattggtttctagttgctaggctcatatttgctctctcacttctcctgagttgacttcagtggcaggatggggggggggcggggggctgcttccctgaagagttctcctgctatgaatgacaagtccaggacaggactttcatttattcagtgtttactaccttctaaatcagtagtttttaagttctagtgcatattagaaaaccctggaacacttagtaaaatgctgaatttgggatcccacctccaaagttcctagttcactggatcagaacattatcagctcccagcttaggtggctgctgagaatccacaaaacaatgctcagaaaactatggtgctttgcctctgctcatttttaacagtgttttctgttttttgggtttgtgtgtgtgtgtgtgtgtgtgtgtgtgtgtgtgtgtgtgtgtgtgtgtgtgtacatgagtactgatgccccgtggcctggtccgacgtctagagttattgtgatctattattagatcgattagttattagatctataagtgattgtgagccacctgatgcgagttcagggactagaactccaagtccttcaggagagcagcaagtgctcgttactgttatgccatcaccagaatgctagttttagctcctaaagaagccttgtgacacagggatggttatttctcccattttacagatggggaaagagatgctttgttgttgcctcaaatttactccaaaatacagcttagaggtatcagagccaaagccagcccctaggcagtctgattccagagccagtattccttacagcattgggctgtaaccttaactcaaggcaccctctaggatggggcagcccccagaaacaacaggcaacatgcacccttgccttgctctgactatcctttcttttcgatgcatcttaaaagcctcctagctgcatatttaattccactctaatcctggagtgtgtattctgagcttagccaccattggcaagacaattcaggcatggggaggtgacttctcttgcattcttttgtcactccccttggcctgagattcccctctttgctgattatttgctgaggcctcaaactgttctttatcagaccatgaatgccacccaatctcgtatcaccatcagcggggatgttttctccacccccaccctggaaaataacctttttttttttcacccttatcccttcacaggtgaatcgtatgtccataatagagacagaaaatcaaacattttagtaaggcagtgttttttaatgttgactgaaaaagaggggcttggccaactgatggggcaactgtactttgtaaaagccctggataacaaagagactgtgatcaagctactgatgatacccctgggtctgtatattgctcaccatgctgggttaaattcctacatgtatcagatggacagctcaatttcacttttcagttttagctgcttctaaagggtgaatgaataattcagtaaataagtgttttgtaggagattctactctctcacataatcggagtagcccaccttaaggattccccggaaataaatgaacatattcaccttctgggtcataatcataattgtggcagagagtaagtaagccctgagtttaaactattattataaattattgagtgtaggccagactctctacctggtgaaaattcctttctaaaatctgcagccccatcaaaacaagttaactgacacacagcaagcatcaccttgtttgtgtatctgaaattttgaaatacgtacaagtatctgggcccaacttcaagaaaatccacctcatttagactggaaggggctaaacatgaatggagctccctaagtgactctagtgtgaagctagggttgaaaaacacatacagggaccacctgcttggaaatagcactggcagtcttggttacaaaggtaaagcagtttttaatactgctgtcttcctccctccaagcccagtctctaattaatgcttctttttcacggaaaggaactaattcaatggttgcttttgggggggagggggttgtttgttttagttcttagcataagaccccacccacccaagtgatggtgactctctatcgccacctggtgtcagaaagtgctactgcgtatggaaaatacaaagagatggctttaaatattcaaaccccaacaaagtagcaatattagctgcatcgagaaaaactggctaatgccaatttccatagccgaggcgaagcaaactctctaagacggtcagaatttgggaatcttgttcctgtaccctaagtttttctgctttttgtctgaaagttatcagtgaagtcggaaggtaatattttgccttccgctagtacttccttttggcatgaaagattgttgaagtttagctaatggcaggtaattacgactttcgaagattaatattgggtacgagcgatatcctctccagagtaatagttaaaatgtaagaactgggttggagaaaggactggtctagcaaataaaagtccttgctttgggtttctaaatgtgtaaaacaaacaaacaaaacaggaacgatatgcatatcatgtagttcgtgtctatggtgaacttaaaagttgtctgtttccaatgacctgtttgacctggtatccctgaccaggtcagttaccaggttaaatgataatggttgctttgtatttatgcagcagaggaagggggtatctaaaaggcaaaggttgtcatctttgaaagtttaggtactgaacagacaagatgttggctttggttgagggatttaaacttcctgactctccacttccctgtgtgaaaaatggaaagaacactgtgtggattacacagtcgggtgcctacctaagtggagaatgactgaagtactaatatgagccaaagaagtatccatatttaaaatattatttcagttagtgtttctcttgaatcaattctgttttggtcacctgagttcatgggctgttaaaccagattctgtgttcaaatcctggttactttgctataagttgctttaaaactgtataataggaataataattatgcttactaattatgagtattaaaacatgttactgtgtgtagagttggttgcaatggtacctaaaatgaggaacttttttttacagtaaatgttagcattgcagttgcttttactattgttctgaaaactactatgtatttaccaagaaccacattcttaattaaaatcattacatagcttagaaatatcataaaaagaaggtgtgctgaaaatactaatttcataagtatcaaaaataagtaaaaacccagcttcactccagtgtaagttttattttaacctttccatagttgttaggtaccaaataaaggtcttgagttgaaatcagtttcccagtctatacctgtaacctttgcttcatctctgcctgatgccaagtgggtttatgggtagaggagggatgggtccaagagttgttttgttttgttttgtttaaataaaggcattggccatgagaagaacataatatgtctcaacagtctctcctcctgaagcctgacatttggaagactctgactggtgacttggaaaacccacatagtatttaatttgtttcatatttaaatttcattatattctaccacactacagcagttaccatttcctgttgataaaaccattacattgtctttggctggtaggatctgtttcaaacatgtggtctttaaatttgcatgtccattcaatcaaaacaaagcatgcgtataagtctaccaattcttattttaaaatcaggcagaggagctggagagatggctgagaggttacgagtacctgttgctcttgcagaggacccaggtttgattcccagcaccaacacggtagtttacaaccatctgtagttctgtttcttggggatccagtaccctcttctaacctccttgggtaccaagcacacacatgatgctcacacatatatgcaggaaatacctttccatacaaaagaaaatatccaaaactaattaaaagttatatctaggcagagagactagggcaggaatttcatgcaagattgttgctatagcattttgaaataatcttcatgtattttagaacacaggaataaaaaaacataatccccaaactggcaataagggtgtgatgtatgtcattaactttcatcaaagtatctctcacagtttccagaatcaacttctttctatcaagacttttttttttgagtcatcacagcagctcagcaagttcaattcctggagagcggactttcctttccgatgagctgtcttcattaaccggttttggtctgtgataggaatccactcttctcttctgcagttcaagaaaagagagcaatgtaaataaacagaaacaaccctctgtttattacctttaatggacaagtgttaaaatttaaaaactgcatacaccttataagataaaacttcaaaatggtactttgacaaaaactatattaataaaagaaagagcacattatatggcaatgttaataatttctctctgaaagtgtgtttactcctctgaaatcctagtctcagaaatacatgttaacaaagacaatgaaactcaattttgtccattttttcttagagagtatccaaagcacaacatgacaattacacttgagaataaagaaatggtgttgggtgttggtggtgcacacttttaaccccagcacttgggaggcagaggcaggtggatctctgtgagttcgaggccagcctggtctactgaatgagtttcatgacactatccaaataatacagagaaaccctgtcttgaaaaaagaacagagagagagagagagagagagagagagagagagagagagagagacagagacagagacagagacagagacagacagagagagagagagagagagagagagagagagagagaaacaaagaaatggcaacatacagcagtgttaactacaaattcatgaataatgacactgcacatgagattctcaccttggataaacaccctttgagaaaaaaataaaactctggggtaacttgcttctatcagttgattgaccataatatgttttaaaaccatacgccatgcctcatcctaataagtagacgtctagtccctgtcatgctcaagatacccacatcactctaactttgcctctggctctttcaaaaacacttttaattttagtatatatttaagtaaacttaccctgtatgtgccttttaaaaacctaattcttcagagttatgtaagtacatgataaagttggagaaaattatctcagtagtactatttgcggaatagcaaacaacttgggaaggtttgtgtggtgaatcatgatgtttgcaattttcatagaatatattctgatcacaatctcacctgcctcatgtccttcaacatctttcccacctccctacccatccaactccacatcatctttctctctttctttagaaaacaaacaagtgaatttaaaaaaaaaacagaattaaataaacaaaaagtaaacatcaagaaacacacatgcagagacatacatactcacacacatgcactagcgagctccataaaaacacaaaatcagaaaccataacatactatataagcaaaagaaccaggaaagaggggaagccaaaacagagcattaggagacaaaggggggggggaacaactccaaaaataccattgagtttattttgtgttgaccatctacaactgggcataaggcctgcccgtaagtgtgacttaaataaccagtgagactccattggagaaaactactttttctctttgtgagtggtcatttgcaataacttctcaagaaaagactgagatgtgatagagaagtgtgtgcttccaaccatccttctggattcaacaaggaaaataaattaaaacgtgatcaatgaagtgattaaatttttcaaaagatggatctcaactcttgtccctggcagattgggatataatgtaagacctaataatctgtctgctgaaatgagtacatagtgaacaataaagaatcattgtcctgccaggacggtggtaacatgcatctttaatcccagcactcaggaggcagaggtaggcagatttctgtgagttcaagtccagcctaatccacagagcgagttccaggacaggctccaaagctacagagagaaaccctgtcttgaaaaaaaaaagaaaaagaaaagaaaaaagaaaaaaatcattatcctatgaaaaactatgctaaaagctaaatagaactttctggcacgtcttgacttttcttcatttaatttttagagtgtagagttgatatattaattatataactgcacagatagatcaacctacttataaatatagagttaatgtttttcttatattttaaaaagatattttgtaagtcttaacatttttagaagaagaatgtgacttgcccatggtgcttaaggaactacatgaatgaactgtctgtcattcattatgctctcaaaagtctgtttgaggctttataacaaaaagaaacactggtgatgatgcaaagaaaagggaattcttgctggtgagactgtacattggtagaaactttatgaaaaataatgtggattttcctcaaaaagctaaaattagaactgccatgtccagctatgctagtccactactggtatatattcagagaagattaattagcatatcaaagagataactacaagcccatatttataatggcagtaaccacattagccaagatatagaatctactaaagagaacatgtggtatatatgcacaattaaatagtattaaaacataaaaaataattaagtcctagcatttttcaacttggataaggcttgaatatgtaagccagaatgtctgttcttacttcagatatcatagaagtagagaagtgttagagacaacatagaaatattgacttcacactctttatgtctcagaacactacagtagagtagcacaaagggttcaaatttatttttatttcattgtttatgagtaactgaaactcttagaaatagagataagaagaagacaagaatgaaaactactcaatgattgtaataaaatcacaggaaacctacagtcagcactgggttacaggtactaagtctatgtatcattgacatgaccaccttggcagaacttcaggcttaaccatcctgctttactaaccagagaagactgaaataaccagattgtgagacctaactcaccacaagtatgaattgagggcgcaggtcttctcttaaagatttggttttaatgggtgcattataatgtattattcctttaatataaatatcttgataagtgttagtgtgacagtgttgacaatgaactgtacacatagacaaattatcaccggacacattttgagatgcatgggtttctcatgtagagacacatctacaactaacaggttgaacatcaatcattcataaaacaaatcctggaccatttcataatctatttctcctgttttctttactcctttcctgaaagcaaccactaacctgctttctgccagtataaacttgtctgctttcatagagttttctttcattggaacgagacagtgggtgatttttcctgtcatttttttccattcagcacaatgatttatagatatccattagacaataggtagagttaaccccttttcattctactatatgttgttctactatatggatataccagatttggggtgttgattaacctgttgacaactatttcagtttcactaattttaagatatgcaagtcttgatacggatatgtgtcccttatttatgggatggctttgtagcaacacaagtattcatacctttgattagaaaagaaagttgtcttaacaatctaaatgaaatcgtcaaataatgggagagacagagccccaactggccatctcttgtcatcaaatgaaacttccagtactagggttggtttacatctaattgagttgttgtccaaaggagccccacaggaacccccaaacaatgcagactgctgccaggactgtaagttgctctccacaaactgaccataaggccccatggctgaaaacaacacccacacaactcaatgacatggagaagtcaaactggtgcctatgtgaagccttcaccccaatgtgctagtgcctttggtatgggaggtactctccagactaccaaaagagaaacataaacaccaatccaatcacacaatgatccacaaaggtgtcctgcctgaaaggtaagctagggcaatggtggcacaaagcttgtaggagtaaccaaccaatatctgatttgacagaaggcccactctacaagatggaacccatacctgacactgcttaggtgaccaaaaaccagagactaagtagcccagggacctagagtaaaaccaaataatactagtcttaaaaaaaaatcaatgaagtgatttctagcaaaaaaaaaatgatatttgctatactcatagatcagtgccttcatcagccatcatcagagaagcttcctcctgcagcagatgtgaacaaataaagagaaccactggcaatcagagagtgagagactttggaacactcagccctaaatgagatgtctccattaaatccctccactcggggcttatggagcccagtggaaggaagaaaggcaggaagaatgtaagagccagaggggatgaagacaccaagcaaacaaggccctccaaatcaacagcatctccacacgtgaactcacagagactaaagcaacatttacagacagggcctacaccagtttgactagagtcctagagctgaaaagagaaattaatacaagcctccatctttaacccagaagctattaccaattgataaccattttcaaatggtagggtaggctgcatgcccagcaggagatggtcaacagaagatgagatgaactcagtagcatctttggaattccttgtctcagaatattttgtcggggctttacctttttaagcatgtttatcttattatttttaaatttttattatttatatgtttccttttctctttttactctacaggtcctttgcatgtatattatggcttccagtttagtatttttatgggattcctaagtgtgtgaacaaatgggtctcttttccttgtgcttctctttgactcttttccttccatttgtttggaccaatctgatgtgttagtttgttagtttttgttttatcatattaatagcttatgtttagtcaataatttaattaataaattaatgaatgataattctgaaacatgtaactatgtattatataacaaagggacatacgacgggcattggtggtgcacacctttaatcccagcactctggaggcagaagcaggtggatctctgtgagttcgagaccaccctggtctacaaaagctagttccaggacagcctccaaaaccacagagaaaccttgtctcgaaaaaaaccaaaaaaaaaaaaaaagggacatacaactgagtaaagaaatattgactctatctagtgtctaagttgctgcatagctttaagctaatcacttagtcacatacaccttagctctcttatccataaaaaagagagaacacatgatcctttttacaactcaccaaatttctaaaaatcaataggatttttctactcatttggtgccaaaacttaactaccctgtgctgatttactgagaagatcttactagaattgagagtctatttttgcttttatttatttcacttagtaaaaaaaaaatccttgaatatgatattacaaaaaaaatcagcaaaattgggctgggcatggcagtgcatggcagtttaatcccagcaatcaagaggcagaggcagagagatctctgggagtctgaggatggcctggtctacaaagagagtcccaggtcagccagggccacacaataagactgtctcagaaaaaaattaatgaatttgattatggattgcattttgtacattgtgttttcctactaaaaatcctcacattttcatttctaaaaagataatttcctccattggatagaattgtgaacactctcccaaaatctccatctctttacaattaacctatatgtcctttttgtgtagtgggaaggaagcatacacacacatgcatgtgtgtctacacacttgcatgaacaaacacatgcgtacaaacacacatccacacacacaaacggctcaaatatgaaatggattctctttcatatgaaagcccaggcacaagcaattctcagatctttgatgactgttgtgtccattgttgcattagtcacatgagattttcttgtgtgagttttgatcacgggtcacattttgggtaagacagatgtgatgctggatcgccagccattccacttgctttccagcaaaaagaaagttaaacaggaagaaaagaagctaggtcacatcttttagtgacacttctctggagttgtcacactacattagtaagaatgtagacatatggctttgcatagatcaagggactaaatatggtcattattttactgctgcctgtccagctaaaatggtaggtaggctccattactagagaacagacatcaggttcacttttagtgtgtgcctgccccctctgctttaataagtagttgttataaaagacaaataacaaactgggcaacagcctgaaagtcaaaatctctatgtgccatgggctatataacccagagggttattttttttaaatcacctttctctctgggtttgatgtaccactgtggtggctttccagggcatcctagggattatgttgtaatgatgggtgaatgccaatttctaccattcctcaaaggctttcttaattattttttgtctacaaggaaatctagtggtttttaaaagatgcttgaacgtctggcatgcttccagaaagctctaacacaaacttgaaacagcttttgtcccacagtcctgcttatgttgcttcctgctctgagctttcccctggatcttttcttagagctgtgaacctgggaacagccctgtggctagtgaatgtgattctcacttactcgtatgaacgtcatcagtaatttctaactattctctctatttgtgcagggtgcttctttaaatgcctgctatggtggttcacaactaaaaataaaaaatcagtctaacccagagaagaacaaaatataattactatttaattaggtaattctgtttaggtaattaggggagggatatatttctgtaagggattctatttctacctatggctggtaatttcagcttagaggaaaagattatgatatttaactttgttgggttaagccacccctttttcagctcaaccttgcctccagtaaatacagtagccttacttcctaccaactcttgtgtctgtatttcagctggcttagaatttggaggaaggaatgatttcatctcctgatcctaagcaaccctgaaaacacaattaaatgataaagggaaggaaggctgaagcatggtcttgtgagccaaagtgcttcctaaggacaggacagaaatgtcaatgtgtgctgctgactgtttattactgtcccaaagaaccactttggagacatgcataggaaaaagagggacatttttgttccagggagaaaatggtcagggccaggctttaagtatgtgtgaggactaaacacagcacagtggtgagtccactggggatggcaaggttatgtctgtttattagaagctcaaaaatacaatgaagacatagtatcttgacatttccaggtacagcatcagcaaccttcttatcagcccacttggctccgcagtaaatctgaatctatcttataaaaaatgaaacaagtgtttgtttgggttttaaacagttaagagaaaaatccaatctggggttaagcccagacaataaacatgccattagtaaagcctaaaccaggatcgattctggaccggcgcttcagaagtggaatcggccatggggttctgcctaagggccatcagtgactgaacatcactgttctcaggcacttttctacttggtgttctatcatttggaatgaaatgagcattctcctaatggatttgcagaattcagtcttggtggctccatgatgtccacacagatgctctagttaaaaagaagaaagcctttgggttggtggctttattttattctatgtattattagtttccatccaatgaaagggaaatataacattgcatttttccctttggttttcatcacgaacagacacattcagaactcttaccaaggcctgtccttgagagtattatgctacagctggtttttattcttgctcctaggtggccctgctgaaatacagttttgctctttagatgcacagatattttgttggaaagtgtaagtaaactgaggggcttcttgcttgcctgagtaaatctgtattaatttaaaatggttgaaatgtatagttatgtcccaccaaatgaagaaaatggctcgctttatctgagagctgagcctatgtcctcttagaaactctagaggcaatcaatcatatctatcgaacgccctacattatagtcaaggaaactatggtacagagatactgaaccatattccccagaccctcaccactatcactgtcagggttaggctctaggtcttatggattccagtccaagactttatttttagaccacatagattttttttatttaaaagaggcagtgaattacagatttttaaaatgtcatcaacttcgtgttagcaacagaatgaggcaaataagaaagtctcttgtgctaagtggcaatccagtcagccattgttggacatgacagggtgtctttctcaaatagcatctgtagggtccatgaaaatctcttccttctctcctccttcccctcccccttccttcctctcgtctctctctctctctctctctctctctctctctctctctctctctctctctcagcttcctcactgaagcttccattcctccctgcaggagatgtaatcaactcctccaatgacattagtaaaaatgggtgtagttaaagtcgctgcatcttaactcttatcagcagcactgacaataaactttgcctcgcagaggaggcttaaggccctaactcatcttctctgatctcagaactgatacaagctcaagttgcttgtggaaacctgtgtcttttcttccagagataataagtaacagaccctatgagtgtctgttgaaggcaagagaaaagcctctgtctgcctttgcgttcccctgggagcaagagctattgtgaggaagcagacaggccttgtgctgcagcctggctcacaatggcacatgctagtgacaagagacataacatcggaccagtggctcctgcctggctgcagctattgatacaagttgtgttgacttgtagttattacgacttcaatcgggaagctgcattccaaatagtaatcagtaccatacaaagctttccagtgtgcactcctcaccctaattaaacaaaatgtaaaggcaattaaaatacacatttgaaagcaagttgttcctcctatggaataaattattttctttttggcttagtttagcatttgaccagagtcagcggaaggaaaagcaacattcatcttattactgacaggaggcaaggattttaatatgcacagataaatgtaatgggaactatctttcatgtcttttaagaagtgtattatgcatgtgtggagtctagcatggttaaattgtgtgtgtgtgtgtgtgtgtgtgtatgtgtgtgtgtgtgtggccgcaaacaaacaaaagctgaatgaacagactcttagccctaagaaggacataaatgtaccctactcacttcttctatttgaaagggttagaaattgagacctgtaagtaattaatcccacaacaatttaaataattgctttatttttattctcatatggtgactagattccaaatcacctgaaaatttataaaatttataaaacaaaaatccaaaacccaaagataatcaaagaatttattagtacccacaaaagagattgggttatgtctaaatttttattttttttaaataaaatacaatgttagtgtaaagtatactttgtattattttaagttttaaataagtttaatgacaaggaacgttatacaacacaacgccttatcgtcgagcgccttaactttggcagcactctgaagttttattgaatttatctgtgtacaccaaaggggcaatttctgagatactttgcttagttcagttgtttttattcttgtcaaagtttattttttattacaaagtaaatcagtagactttaaatgagcaaaatttatattttcccagtgctgatattttcatgtatatttatgatgcctagtcttgatttagcatcacctgggagacaaacctctgggtgtgtctaagagggaatttgcagaggttttactgaaatgagaaggccatcctgaatgtgggaggtaccatcaaagggatgagaaggatgaacaaaaatgaaaatacaagcatagtatcaacacccatctctgtgctttttgagtgtagactatctacttcatgttcctgccaccagaccttcccaaactgtgagttcaagtatacacttgctcaaggtatgcttttgtcaggcattctgtcatagcaatgaataatcaatacaaattgcattggtttttcaatagaagaaacatttgcacttaagtttttgctttttggtttttagcaaattcaatttttaaaatttttcatatatacaccaaagaattaaaaataaccagagatagataatataaagaaggaacctaatataaatgtgccaggtaataagaaatctgtaagagtcagggtttgatgagaagaatggacttcacatcagtctcaaggtacatttaaaagttagtcgcacaggtaaaagaatgtagacggaaatcctcacttcctaaatggacctgataactggggcttgtgtttgcttacaagtaaatcccagggctccacttcagatctactgttcgatgggttaaatcaagagatctgtaagttgttaacaaatagtccctagatgctaatgtaggtgacctagaccatactaaagaaactctgaattaagctataacataaggacttaggtaacacacaagcaaaagaaagtatacaagcacactacactctatctatgggaatatttcccaacaatcactaactgtttctcaaattaaaatgtaaaaaaccctccagtccgataattgtgaggagtctgcatgctataactaagattcagaaactcatggcttgttctagcatacaaaaagtctgtgtaactctaggtccactttctaagcttaataagaatgtgtttttagtcaatgcacttttctttatttataacccattgaggctgttcccagaaaacacacttagagaaacaataaagtaatcacaagcaaaatgatagaaaagttttgacttttgatctgtaaacatctccatcctcaaagtcctaacatgctattggatctatttacacatgaaggaaatgttcaggcttcagggctgtgtacaatgatgttgtgctaagtctggctattgtttgaaagattttcctctaggactaggaggccccttttttgtattttctgactttttccttcttcaagatgagaaatcttagtcacagcagctggtgttgactttcccaatttaaccatttcatgcctatttatatatcaagccacaatcattaagttgccatttttggaaagtaacaagtgacattgttttctcttaccctttgtagaaaacaaacaaaactctttatggaaaacagtttactgagtggtttttaaaggagatttgaatttgctttttattgcactgtatgagagttgtcctaaaatgctcaatctctctcctgtttccatatctactgacaagcatccaaggcctgctgggaaggttacagaagaaggtatgaaaacccacacagatttgtgaccacctaactcagagacgctcatgccagcaccagctaattccactctccagaacctacaaatggcaactctgtcctctcttgggatcttgttttcattcttttggcttctcctcggtgtgtacctcagccttttgatggccttaggagaaaacaagagccctgagttggaaacatcctagagcacagaaatcatttctcatactgccatttcccgagtcctcctaggaggacttcctcttcttgtacagctgattagatgaagattgtattcttcctaacacagctcctgaggaatctccatggagattcagactttttccctctctctgtatgtctaactataaaccaggaaaaatagtggattctagggatttgctcttgcacctcttcagtaaagggaccattttagaagttattgcagatgaaaaaaatcatatgtatatatgatttttcatttaatatatactccttccatttgttcatcctgtctttcctctcatttggatcttatggttggtttttctcatcagaaaagtagcatcctaacaaaataagaagtctctccatctacagccctatcagatttttttatttcagccacttttttttgtcaaattttattttattttctgtatatgagtattttccctgaatgacgtgtgtataccacatgtgtgctccatgccctcagagagaagacaagggcatcagcccctctggaactagaggtacagctgagttccaccatgtgggttctggaaacagaaccagatctgcaacagaggtgagtactttgaactgataacccatctctccagcccctcctaccctcacctcttaaaagatcacttctgctgctagtatttcattccagattgctcttattgaagacaataatgtgctccaatgtttctgtgttccaatactagtcttttcatctcctctctccatagtctccatagcagttgtggtcttccaactaactacttactgtgacgttcattctctgctgtcttgataacaccattgtcttctggtttctaatttcttttccctttgcatggtcacccacttcatggattactatgttagagttcttcatccttcactccaggccctctcttttctacttttcttctgtgttgtttcataccggttattgattttaagtaccatttagaacttagctattcacaggcctgtacctctttttctgaattttatagatgggcaattcatcctgaatgcctgaaaactgcctcaaactgaacacaatcaattaaacctaagtttatgactctgcagggttccttaattgtgttagtctttcaatagcctctgtgttctgaaaactaaaatcgtagtcatccattcaatctgctttttactctcttcccatatcttatcattagaccttgcaattgtccctacaatccacccattttctccactttccccacccctccagtcaagatgtcattcctcgtgtggatctttacaaaaacatcctaaatggactatctgtatctctacttgtctccctgcaactgttcttactctagagcaagaatgtgcttcaaattaaaaccatcagcctttccattgctaatggaagacatgaaagtaggagagggctgagaaggttccagctaaagagagagggggtaagagaagggaatagagggtcaaaaaaccctatcattacataaatgtacaaaactctccagcaataaaatataaattgaatttcagttactggacttttcaaaacagtgcagctaaactctaggcttggccctcatggcctcttctctatttcccttctactgtactctccagctgtgttggctacttctgtaaataaccctccatggactatttatagaactcagatcctgttgtttgtctgcatactaaaagactgaaattttaggcagtgccctttataccttccacaagtatttaataaaaatcacattgtgtttgaccaactgttccaccatttcaaggacaaacaaatccagagggatttaattaatgccaatgctcttgacctgaaatctacctttaaaaatctctgtacttcagcaacaatgtgatttcagtgtttttaagattagctacttaaagtataaatgtacacaaagaacataaacacaggtctaagtctttccatgcccaagtcacgaccagtctcatgaaagtatgacacagacacatatagtcacaaatatatacatctctgtgtatgtgcaacacacataaacccatacatctaattgttgcctggagagttttttgtgaggttagtctttagtggtaacctcatcaaaagtcatggtgtgtctcagaatacacctacacctatcccctgtctattagaaagtcttggcactgaaaattgacagcaaacctgaaaagtagaaacagaatgtttttgtacagaaacactttcccttgaaatcattgtcatgttgtatattccttagcttcactgaattccaattttctgatatgtagaaaggaaatactaagtgaccctaaactttcacccatgtctgcttaaccaccttaacgaaactaatgcagggaagtatagtacagcagcagtttgtctgccttgtccttttgaggtatttggctaaaatggagctcaagatgaatttgtttttttgttttgttttggtttggtttggtttggtttttggtttttcaagacagggtttctctgtataactttggagcctgtcctggcacttgctctgtagaccaggctggcctcgaactcagagagatccgcctgcctctgcctcccaagtgctgggattaaaggcgtgcgccaccaacacccagctcaagatgaatttataatttggagcaaaaacattctaaatgtttattttggagcccttgtcttggaggttagattgtaaacagtgtggtaagatcatgaccaagaaataaagggcaggtgagaaaagaagaaaaagtgggtgtacagaaagaaactgaggtggaaaaaaaaaaacccacaaggcctgtgactgaatgaggagattctcaacctccagttgactttcgaggtgggagtatgacctgagcttcccattcctgtgaagttctttcacacattcaaccaactactgctgcaccaacaacacacagcaagcagtatgaaatcagaagtacctctttatggagccagcagaaacatctaagttttattccaatgacgcctcatttctattggtgatattttgtgtttatttggtatcttgaaagcaaaatgcttaaaacccaagtcacacctggaaaacaggaagaacaatagtagtatgaacttgataggtttatgaacaatctgatgtgtgccagggtgtaggatgattccacaaacataactgtcacagacttattatttcttaagtggtcattaaacttcaggcccagtcatctgaggggaaaaaacacatgtgcccaaggacgtcttgcatttatcattatggctacccttctacttctcctaaactgaaattttcctttgtaatctctttatttctgaatatatatacaatcttaaaataagtttttccagatattcatgtctgaaagctatgaatagatactgatgataaatcatgtaaaatttgtcatcttcctctaccttgtccaaaagtcatatttactgcttaatattatgatagcttttattattattagtgttgcaccatctgcaaagcttctattgcatcagttaggattcttgatgaacacacacacacacacacacacacacacacacacaaacacacaccaaaaagccttcatctaaaaatggaatttgttggttcatgtaacaaagtctaaaggaagataataaactcatcttgcttttggacttaaaaaaatatagcaagatccagattttcataattcctaagggctgtctgcttctgtatagtaattttttttgctaacacatacttcatgcatatggtgaaaagatggcaagggtagcctctgtctgtgttggtacagtggcatcccagaaaagttgtcattcctgagctaatctgggtagatagataccccatgatccaagaaaccaatgtgaactgagtgcaactaattttagacagtaagagataaaaagaaatttctttaaatttcataaatattctaaggatggaaaggaagtaatatgagcaaatttttgttgataactaataattttgtcaaatcactaagctgtttctcaaattactttcacattaatctgggaagttacaaaaaacaaaaaaaaaaatctctttgtattcgttagccaatggcaaactcaatattagaacagttgacaaatgtgtggtctcattttttttcatggatcaacattcatatttgtgtgtgtatacatatatatttgaatcatagatattttacatttatttatgtttatgtgaaaggacatttctctcatattcaccagcataccagtccctttttaaaaagacaatatcaaagtttgattttttttatgtttacagtaaacaaaagaaattctgcattgtatctttgtatattagccatcataattctaaggttttgcaagatttactttccaaattataacaaggactatgtacctgtatgagcagaaactctgtttgcccctgtgctaccctcttgcttacatataccactactatttcttcctttcctcctgggttcacctaaattctttcctccagctcccataggctgtagaaaattcctactccttttgcttacaaagcaagcttcatctttttagtttgtgtgattcctatgtatcctgtctacatccagacaaagccagatgcattacttattgactatgtatgcactatccaaaacagtttgtttctggaactctttcttctgatccaacagactcaagccctcctttctgaaagaagcacttccctcactctacacattatcattggtatgcctcataattaaccaaaagctattaagatactaagtaaatatttaaaccatcctacagaatgggcttcattattagtcatctgacagtgacaaagacaaataactttccagtcatttatcaatatttatacagtgattttctacaaccctgctgctctctaaggaaagtatttaggaagaatttgtgtacttgaccattaatttgtaatttttttttaatgaaatggaatgcaccagccagcttctttaaaatggtgccctgccatgctttcacattaatttcagtcttagtagctttggtcttgtttttaaattagtattattatttggcatatttatgatatttaatttagaagtaatactgaaagttctcatttattttcaatcagtacaagttctttctgtctgtaggctgccagatcttgacctattaaaatccacatttattaatgcttatggctcatggtctgctttgagcctccctaatcacacagtccttcctgtcttcgttttcttttaaatcagactttaaaacatgtctcccttctctaccatcaatcattagttaagccttgatttgttaaaacctctggaagcattatgttggtcaaatggttagatttcaggcccatgtctcttatcattagccagaggctttacatctgatccccatagccactcaagaggggcattgtcgtgcatgagttctcgtggagaaggtcattctgacaaaagactcctgcctaatttatatagtgaggcacgcccgctaattctggtctcggaactctgaccagttaccaattgattcctatcagtgttgtgtgagatgaaaaattttaatcagcgcttttggtctctaatagtctggctttctttttataatggatctctttcattcatgctttccctcgtctgcatttttatgactgtgatgtgctttgatttacttcattcgaagtatgatgctctggcttcaattattcaatttaactttaaatagacattgctacaagtcttactgatacaaaggacatctggtgtcaataaattgcagcgggaggtgccatgtgggaaggaacccaggcactaaacacatctctaggcacatccatcaagacatgccatggcattctgccacttatcttcttaaatgacatcagagtgcagctcaagagactcaagccactagagcaccattttggtcttcactgactcatggacctacaaatccagacacaaaacactgtgtccagtcagtgagaactttgagggtgacctccactaagcaggaaggactcacacaacaaaggcactcctctcttctttatcgtagacaaactgttggcggaagagtacgctctaggagtctaaacaaagaatcccgcccttgctcccagcaaaacaacccacaccaagcccaaagtgctgagatttctactggaaatgggttttccacctagctgtttctgtcagttccagtgacaagttttaataattgccaaagaccatcacatctacattgtagagtttaaaatggttgaaatcaggagaaccttgccttgattttaagcctgaaaaagggaactctccctaattgcaaaagtatgaataatggagaaataatttacaagagatgcaactgaaacttaaattgtattctgtatacaagaatctatgaaccaaagttattcatggataatctgaaattagtgaatcataggcagtctttaaatgattttatttgaaattacttatgggtcatatagttaggaagcagatttctgttttgtatagtattaaaatattttgaaaattggatttcttgcggatgacagaaatctaccttaatgagtcattgtttgttatttatggcttcacagactctgctcctgtaccaggaaggcaactgacagtgccatggagatcaatcacatcctcctagtttaattggtaatgtaaaatgaggatgtcattctttgtaatcttacagaaggactccaacttgccctgctctgtgatgttctcaccctgggagcagctagggcttcagaaagctctaagggaagaggcagacaggctctgttcccaggaagagtgtactgagaatgctgactgggcaagaccagactgagaaagaggagggggcgggtaatagcaatgtgtagcatgtccctgacaggtaaaaaaaaaaaaaaaaaaaacaacttccaaataagggttggagattgtctgagaaaagcatgtgtcttttttccatttccccaaagttgcgttgcctgcatctgcatagaatataccatggtgtcctaccataaaggatgctaagaggcagttcagtaagtgaaggggaaagactagacgacgcaaagatagaaaaccattcttccttgcttttcctatttgaagaaaagttctcactctaaagtcctggttggctctttctgagtagtgtacgatgaccatctacgccttcctgtctcatcctcccagatgttacaactacagaatgccaccatgaatggcaggaagctttctttaaatgaaattcttgtcaaggaacgtctaatgtgctacaattgagaatctcaaagggtcatacagcacataaaacttctaaaacatgcttaggtagagtggtttttcatttttattcattagagacaataaaagcttagatgactttgtggcacgttattctgccattctagcaactttatgaatcaaaaaggcaatctgatgctgtaattcaggaccaaagcttctttctattaaaatgtctgagaggttagaaagatgagtcaacctctggagggtgtttctgtacctgctgatctttctttccagcatttggtactagattctgtaaggtgggtcactggaataggctaactgagtcacctcaatatgatgttcataatctaataaaatacaaaaataatattgtgaaagcatgctaatgtcagttattgtgagactctatcctctgggcatgaccttgccgttgtcatcttaaataaggctatgtgtgattagcagcccgagaccatcacaagatcgggaccactaatattccctctggaaaaggtaaagggctcacagcctttgtgaagtgactcatgaagcagtgtctaaggaggctcacatggtgcaggaagcaagctagccaactgctgcccactctctaagaatataagtgattaacaatctctacgtctcagaggagactcttcagtgacacaactgcccataatttgctcaggcttctgtaagtaacttctcactcatgcctcagtaatttcaactaaattcacaggttcacccagctcagctagggtggaattgttcctttggtctgtcattgccttctctttatgcagtgagtagaaacagagtgctcaaagtcatgcaacattaattacaaaattaaacttcatttaattagcaattaatttcaagattcaaagtctcatgataggatgcctgaagagctttgggagttggtttttaagttatctgtaacatgtatcatttgacatggtagcagtaggaaatgagagtggataacagcactcagtgtcttctgcactactgagttcccatcaagtctgcatcagacctgaatctcttggactcttccagattgattctaaatcattggtggttaaaactgaagcctttagattgaaggtaaccatttcctgtagagataaaactctccactggcagctcattgttattgcctaaatactgcaatatttgaaaccatgaaacaatacattgacaatgattttgtcagctctttttaatacgttttatcttgttctgagagttttgaagcaattatatctctgtctttttgtttgtttgtttgtttgtctgtttgagacaggatttctctgtagctatggagcctgtcctagaaccggatctgtagaacaggttggccttgaactcacagagatccacctgtctctgcctcctgagtgctgggattaaaggtgtgtgccaccactgcctggccatctgtgtcttttttttttatattttagccatcctttcccttcctcataaaacagggtcagttgatatcacaagaaaatttgttaagcagagtaatttttttggaaagttggttggtacaacatactctttcaccaagagcagataaccctgagtgtctaataagggtacaggatattttgttcttagaatttgttccatctcttcacacactggattcatgtacacaacccccaagtatgatctactcaagaacaacaattgaactacataaggagatgtttcagatttcatataaggtactaggattgcagtaatgagcaagagacccttgaggccatggattttggagataaacaaaatatgttagaatagaggtaggtaaggtaggaccagatgcagtcttactggagcacggaagtgttctgagacacaatgacacatcttcctgtgacagttggattgtggttaggtaaaatgaattgggtaaactttttagatgaagaacatataaaaacaaatgagagagagatcatattcagtatattcagtttgggtattggagtaaaagaatggcaaaatatgaagtgtgaggcaaatggaatccaggtaaattaagattcatacatacatacatgatgcatacatacattaactgattgttatggaaacagagtaacattatttttaaaggcttattctatgttctgagattatattttaactacatttctccatttcatttcctctctccaaaccctctaatatatggcttcttcccaactctccttcaaattcatggcctcttttttcatcaattgttattgcatgcatatatggatgtgtgcatatacatgtattcttaaatataatatcttgagtccatatactgttacttgtattttttcagggctgatcatttggcactggacaaccaattagtgtgctcttccctgggactagtcaccgggcccactcccaactttactcagttgccaactttactcagttctttgtgtacgtttgagggcttttcccacacaatttagcaagttaattggtgttcccttattctacccacatttgtgtggtcatgttggcgagattttaagaggtgtaaattccaatgtttgtaggagacacaatctcacagcaaactccctgatcctctgacctttaaaatctttctgccccctcttcccttcttccataatttccctgagccttaggtgtggaaatattttgtagatatatcccatgggactgggctccacaaatctatatgtcgattagttgtggttttctatagtggcccagtctgttacaaagagaagtttccttggtaaagggcaacagctacatttatctgtgcatagaagtttaaaaagtgctgttagggattatactactggtttagtaaattagaggttatagattctgctccaatgcccatgtctttgttagcactgagtagttagttgggtttctagtaccaggcatggtattcctatccctctcttgagcaggtcttaagtccaagtagagagcagttggttactgccaacgcatgtgtgccactaatacacattgggataatcatgtcatgctggtcattggtgtggttcataggtactgttgttttcttcctcctttggaagtttgcatggtgttttttggtactatgaaaactagtcataaaagagggagcattcatgttagttccagctcagggtcctctgggccttgtgctgaaatgcatggtatcttcagcagttgtgtcttaacttacatgtttgggggttaaccaaaggcaacagcaacaagctgtatgcttggggccttcttagaggagggtgaggagattaatgctttaaagtttcaatagtgaatagcataagccattttactatgattgtttcaattaatttttcagtgatactgaacaaaaaataattctttctagctcaatttgtagaacaagaaaggttctgtggtgccgtttgcattgctaatagtccacaaagcatttacccctttacatagctctgctttctattattaaagtattagacacatttttataaatttatccattaagaataaaacgtagaaaaatagcaaagcatacagtggtttgggtgctggaaaaaaatgcatgcacttgtggggggagggagagggagagggaaagtacatgtgaaaatattaataatttaataaaaaaagaggaaaaaaatgcatgcacttctgtaacttcacctaactatatttgacaattccttttaaatcacctataaaaggttgattctaatagcattagtgagtttattaagtgcacacttacataggttgaaaggcaacccaaaccattcaaaacacagaaatcatttttccaggaaataatgtgtctgctttattgcctttgaaaattgccacttacctaaagaaccatgattacaagtaagtccttaacgtgttttgatgttacttatgcccttagcttgcatgaacttatggtgatttccagtgcaatctgcttgtcttgctcctgggattctcaatatttttgatgatgttctttagataaaaggatctatccttattaacttgaaaagagcagcgtctattagcattgcccttaacacatatggaaatacttcagtaaattgcccagtttctccgtcttcctcatttttatagtagtaagatgtttatattacattctagacacaatataatgatataaaggtaaggtcaagaatgatttttataaaatgtaactcctcattaatttctcctttgataaagcatcttcatataactcacaccagttattagcctcaatactcatttaaacctgaataaaaaagaaatagagatacatttctccaaaatataacattaagtggtaacataaatattaatcgatcaaaaaagttaatgaggtgaatgatcaaagtactctatcaaaatgaaaaagataggaagacaagatggttattttaatgaagtggtccaggaagtgagtgggaagagacacagggaccaagagacatctgggaaagggacaagagagatgtctctgataaagaaaatggagcctaacatacagataaaggattggatttatgtaaagatgtgggtaattgtcctatacagaggaagcacaggagagggaagaatagatggagaagtatataagacaatgaatgagtaattttagattcagaatttgtagaaggtatctttttgaatggctcttttatgactcgaaggtaaaagcaggcaacaaagagttacaaatctacaggagcagaaagcttgaaagagttatccaggaatctgaagatggactagagaagagaaaaacagtgtggattgctgggtatcacttaaagccagtgtagtatttataagcagagaagttaaacttctataagcagagaaagattgagattttctcgagtcagactctcctgcatgaactttggggagagaaagatttttaaaaaataatttatttaactttattttattgcattggtatgaaggtatcagatcccctagaactggagttagagactagttgtgagctgccttgtgggtgctcggaattgaacccaggtcctctggaagagcagttagtgctcttaacctctgagccatctctccagcccccagagtaagatttttatcaaagtaaatctttatgagctttagaatagagttgggatgtatatgaagaggaagaagcaataattaatcatgaaatttttagaaggtagtatcaattgattttaggtaccactgtaatagagcattaataggcttggggtgctggagagagtaaactatatggaaagtgagtaatagctggagattaagacacatgaaattgaaattctggagaatgtgaagtgattagtaaatgcaagggcaggtgtataactgagaggaatcatcgaaagagagaagagcaaggggacaagaagctgggatttagtcacatcatttaggtatatatgaaagctaacagaagttatatagagtggtatctatgagataaaactgagcaaaataaaggttttcaagctaaataatatctttaaaaaaaaccttagataacagcataaatgtgagatgttcaaaaataaatagagactataaaataaccaaattagtaagttttaaatcaccagttattggaaacccactgcccctgatgtaataagcaaatcaaactgaattaataagtccaagtttaatctgagaaaagcatattcaggtggctctgagggaaaaggagaagaccacaaagagaactcatgagatgggagcttttaataccctctatgggtggagccacctatggcaggttttctcaggggtggagtctagactgaagcaactccagggaagcaccgcgcccccacttggtgccctgaggggaagggtttgcaatggagccctgagctggagattccaaacatctgggggtgttaaagttcttctgattgtcttctaataatgttcatgccttttaacccatagccttttgatatgataccaagatgtaaatctgttccagttgttttacagacacctacaggtgcctgggagaagttttgctactgtatcaagacatctggtctgctgaaaaccaacagtccccagagcccattttgaccccacccatttcagcttatcttgcaggttcactcctcctgcctaggccaacacacggaggatcctccagataacgctaacacctgcaccatctcctaggacttcagcagtgcaacctgccttctccacctcctcaaggaacagatgcctgagatctctaggatggcagttaactgaatgcttcttcattcttatcaccccctgtgtgtgagcctactgacttctgacttcaccttccccatgcagtctcttgtcagcaggaagacaccagacttgaaccagcactcctatataccctaagagtttgggatgtttaggtggaagctctaccagcgtctatatctatccaaaaaggttgggatgtttggactctccagcttgaggctccattgcaaaccttgccctcagggtgccaagcagtgggggggaggcctcccctggatctgcctcagcccagactctggctcttagaaagcccacctttggaagctccacccccagagggctttaaaagctcccacctcatgggttctcctcatggtgttctataacaataagtctttatgccaaagccgccaaagcgtgctttccaccaagctgcctgagttcctgccatgcattagggccccaaataacacagagattaatattaggtacaaatgctgctggccaattgactaggatttcttatatggtagctcagtcttaattatcataaatctatatattttataagacttatcttatcgaggattgctttccgctggtgtcctcttcccaggatcacatggcggctctgaagagaagagagcaggaggaagaggaagagcaagaggatgatatcctgtttgtccctgcttatattctgagtcagcctgctatgtcacttcctgcctggatcacaagacttctttactgcatttcccagaattccccttgactcctagtcccacctatcttgctcccctattggccaacagtgctttattcaacaaccaataagataaacatatacacagaaggacattccccatcagcgttctccttttcccttggggccactcagaaatgcttttctcagattaaacctggatttattaatttagtttgattgacttatgacatcagcagcaatgggtttccaataactgggatttaaaacttatcaaaaaatgtgatactgacaattaagcagggtagaaggacatctggattttataaatttgattaataatgtacttttttattttaatgaaattttatatgggttggacttaaactctctatgtagccaaaggatggccttgaattcctcttttttatcctcatgcccctagagcactgagattacaagtgtgtgccaccatgacctgaatctatttctttagtgtgtgtgtgtgtgtgtgtgtgtgtgtgtgtgtgtgagagagagagagagagagagagagagagagagagagagagagagagaatgagacctgccatggcctgtactggagatcagaaaacaatttgcatgagtcagttcttgggagctgagacggggtcacaatatgcctggctggtctgaaaattgctacgcagacaaacttggcctcaaacagaaatctgcctgccctgctttcaaaatgcaggacctaaaggtttgtgccatcatacctagcctgtgttcttcccttctaccatgtagattctggaatcaaactcagttcataatgcctcggcaccagtgcctcttccttctgagctgtctcagtggcactgatatgcactctaagtcaattttggaggcatcaacttgtaagaaaatgacaggtattttgagtacttcctcaccaccactgatgtacctggagagaggccatttatattaaaagagacttcacagttaccagagagatcctgtgtttatgaagcagttttaggatttagcttcactttcttatcatacaaatggcattctaaacatccatctaatcatacacaaatacactgaattattaattgcaaatacatttcctctttagcctaaaggaaagaactaaatcagtagcatgtgtgcaagattgtgggcatcctgttgttaaattcagtactcatttcttcagaccattaaaaaaaaggactttggatatttaataaaaatgtgaaatgtcttttcttaattaatttttatttaaattaaaaataatcttattttacataccaatctcagttccctctccctcctgtcctgacaatccccccaccaaccccccatctaatactcagggagggtgagacctcccataggggatcatcaaagtctgtcacatcatttgggcgggacctaggccttcccccatgtatctaggctgagagagtatccctccataaggaatgggctcccaaagcccattcgtgcattagggataaatactggttctactgccagaggccgcatggccgctaaggcctcctaactgacacccacgttcagggggcctggtttggtcctatgctatgtccccagctgtcagacaagaactttcagtctttttttttttttttttttttttttttggtttttttgagacagggtttctctgtgtagctttggagcctatcctggcacttgctctggggacgaactttcagtctttaaagaaagaaattaaagatgatatcagaaaatagaaagatgtctcatgcttttggataggtaggatcaacatagtaaaaatggcaatcttaccaaaagcaatctacagattcaatataatccccatcaatataccagtacatttcttcacagactgtgaaagaacaacactcaactttatatggaaaaacaaaaaacccaagatagccaaaacaacccggtacaataaaggaacttccggaagcatcaccatccctgacttcaagctctaccatagagctgcagtaatgaaaatagtttggtattggcacaaaaccagacaggtgaaccaatggaatcaaattgaagacccaaatattaacccacacacctatgaataccagatttttgacaaagaagttaaaattatacaatggaaaaaaagaaagcatctccaacaaatggtgctggcataactggatgctggcatgtagaagactgcagatagatccatgcctataaccatgcacaaaacttaagtccaaatggatcaaagacctcaacataaatccagccatactgaacctattagaagagaaagtgggaagtacccttgaacccataccagttcctgaacaaaacaccagtagcacagacactgagattgacaataaatgggacctcctggaaataagtgtcttttttaaaagaaaaactatatttaaacttttacttgtcactttaaaatatggctgtgggtatagctcagtggtagagcacatgttcatcatgctctaggacacgcactcaagtcacagaaccactcagaagagtgaaacagcaaggggactatgaagatttaatggaattatttaataacttgtaattatactaacaatattaaaacaattattctgctggttctatacagaaaggccaattgctattagagtgtgacagactaaatttttgtactcctgtctatgtgtatttaggacatgtgtatgtgcgtgtgtgttgtgtgttttgtgtgtgtgtgtgtgtgtgtgtgtgtgtgtgtgtgtgtgtgtgtactcgagaatgattacatgagttaagaacaatcaacaaattacatatattctttatagtagcaaaattgttaaaaatttggtgccgcccaccagagagactgggaaatagggaggaccctaagagagacatacatggtcccccggagatggggaaatggacaagatctcctgagctaattgggagcatggagagaggagaaagagatataggagaaagagagagaaggggagaagaggaagggagaggaggacatgagggaacaagaagattgagtcaggggaagaggagaggagagcaagaaaagagataccataatagagggagccattgtagatttagagagaaatctggcactagggaaatgttcagagatctgcaaggatgaccccccactaacaatctaagcaatagtggagaggctaccttaaatgcccttcccctataatgagaatgatgactaccttatatgccatcctagagccttcatccagtagctgatggaagcagaagcagatatccacagctaaacactgagctgaactcctggagtgcagttgcagatagggaggagtaatgagcaaaagggtcattaccaggctggaaagacacacacaggcagctgacctgaacaagggggagctcatgaaccccagattgatagctgagaaaccagcataggactgactcagaccccgtgaatgtaggtgtcagttgggagacctgggcaatctacgggggcctctggcagtggatcagtatttatccctagtgtataaatggactttgggagtccattccacatagagggttactctctcagcctagacacatgggggaaggcctaggccctgctccaaatgatatgacagactttgaagatccccatggaaggcttcaccctccctggggagcagaaaatggatgggacaggggattggtaggagggtagggagagggaactgggattgacatgtaaaacaagcttattcctaatttaaattaaaaaacaaacaaacaaacaaacttggtgctggagagattgcccagcagttaaggatgcttgctggtattccaaaagacccaagtttggctcctaccatccacatcagacagcttttaactttgaaaaattatcacaaactgatatatgtacacacgtgcacacatttgcattttttttttcttctgagagcagtattaaacatgcaccggcacaatgctagctacaactttgcacatacttttaaattcattgaaggcctagttagaaagataagaactcttcaacagagtctggaacgacacagcctgagaaagcaagtacacaaattcaaaatatgtagtgtggttcattgtggcaatggttggttgtagcgttttaccacttctgctcacctacaggaagagaaagaaaaactgcacagaacccatcttcatttttgatagcacaaagggaattgtttggggtggtaaatgaaagtctaccaaatgctaaccatttcatgtacaatattttgttcatcactttttaaatttgttttatttttattatgtggtggagtgagtatgaccacacgattgggggtgcctaccgaagccagagacactggattctgctggagctgacttacaagcagtctgccgaaagtgggagatgggaatcagagtcctttgcaacaacagcatgctctttgaccactgaaacatctccgtaggctgttttgtcactcttgaaaataaatatttttcaacttcgaaatagtccaagacgtacaaactcggctccttagcttgatgttgctacttgaatcttcctaatttaacattctcttcttccagggcagttttgtcttgtgctgggaacaaagagatgatggagagttctcattaagacttacgacgggatagacaacagggaggagtactgcgcgaagggctgctctcgggacatgtcatagctgttacattcatgaactcaccacagctgtggttacccgcacacactcaagccaaagttctggcgtggatcagggagggaccacaatgcctggatgcttagcagaggccccactcccagctgaggcactaagagcaggtaagcacctggggaaagagagacatttttctttggggttgccaccactggtaagcgttgcaaactccaaaggctgcctgcacactcgtttgcatacagaccacgctaattggatgcaatgggggaaaaagaaaacatgcacttggaaggagaggcatgttagggggatttcaaggagggaaatggatacacgcatgaaactttcagggaataaataaaatatttaaaatagaactgacgataatgaagtcgtatgaaaaccctggaaatgaccagagagaaacatctttgcaggagtgcctccaggtcagtgaggtcatgaaacgtaattctacttgctaatctagaactaacatttacttaacttctcactatagaaatttgtatcatttctcatgccaggtttttggcacttttttttttctctagctatccaacacattgctctacatattgaggtacacatacgctgcaaaatcaaacggtctttgattttacctccatttccaggtgtctttcttttctttctttcttttttttttttttttttacacaaagaggtttgagttcatttattaaatgaattcctacatctaaatccttgtaggaaatgcaacataaatatttcctccttttaattccttaatctttctttctgttctaatttacaccaaaggaaacagtctctacccagagacagaatgtctttccgtttggtgcctggtgtttgtaggacagaccatgtaagggggatttcctagagactcgtgtctgcagttccatccgctggctctagtgtctagtgttcctgcagctgggatggaaaacagctggctgccagctccctcacattgcttactagtttgatatatcagaaaagcatagaagaggcaaggcgactaaaacaagataaatatgccagaagaagaaggaagggaaatacctcagaataatttgggtgtgaaaaaaactctcctttgaacttgcttcagggagactctggggactgtgcataatgaggctaggtatatgtggttaatattagggagggggtcatgttacaggggcggaaatataatgagaataatgctcactctgaagaattatagagtatggagcacttggcctttgtacagacttacagcaagttatctccctgttcactgtgatccaatgatggtttttctctgatttgccttatatgctttagtttatttcctaactctcttatacctaacaagaagattctttctttttgctgctagtgttccttcttaaacttaataagtgttgttctgggtcggatatgaatagatcataccaatagctatctcaagagtactttagaaataattgacatcaaaaaagaagtgtcaaatgcagcgctcctctaaacatctcatccagttttgccatctttaaccttggatgttactgtggcacatttatagaattaggagcctgacattagcccattatcattattattaactaaactccaggcattgtttggatttcatcggttttccattagtgtgttcttactgtgccacgatccaactctcctgaagtgctcttagttatgtcttctcagtccccactaggatgcaacagcttgccagtattctgtttttcatgactttgtcattgaagtgttttttctagcatcctgtagaatgtctcacaagctgagtttgatgttgttgttgttgttgtttttaatgtaccttggagttgcagatttttataggggagtatcattggtaagagctattgtcataataagaagggtagtacatggcatccataggatgataaagtttataccttatttaaggttgtaattgacagtaaattccactacttacctctcttcaagctctattcttctcaggggaggtgttaccaagtatagcccattgtgtagctcattggatagtgagagaagcaagattaagcataacctcctgaaagggtcaaagtccccttctctgttcattattctataaagttctcttgttcaagaaccatcacattcaactgataatttgagctgttaaatgactctacatggatgggcaatggtggccacacctttaatcccagcacctagtaggcagagttcaaggccagcctggtctacagagcaagttccaggacagtcagtgctacacagaaaaatcctattttgaaaaaccaaaaacaataacaaaataaaaaataaatgactcgacatctactcattttcatgctttcaacagcaggaagatgtctatcagcttactaagatggtggaaatgcatgtgtttcttgggaagccgtgtctagtctaaatgcatgagcaattcagtaactgatgagagtcaaggcaaatgttccctactggtcatgctttcccacattaatccttctaaaatttaaggatttatgtgacctttatcaccctctactaataaagtcagaccagatttccatacacgctaattccaacgtgtgggacaggaaggctcctaagacaaggaatctacttgcatggttcagtgcaattaaactcagtgctactttctccatcaaatccactaaatgtaaacatgttaacagggaaatgttttatataagcccatcttttgttgggaattaaaggcatgggtgatccaaaataacgatctaaagtcagagtgacagtcagttgtcctactgaccagaaagctgtgtcagcctatcagtctagcgagtcccatgaactgagagtttttctggctcaagggtcccttaaattgttttccttctgtttcctctaataattgctatgaatttagaaaccttgactgaccagacttaactaagtcatgggatatctcttcctccttgctctgtaatataattagccccaaagcatttctttataacctggattctcaacctgtgggttgacacctctttggggtgggggtcaaatgacacttttacaggggtcacctaagaccattggaaaacacagatctttacattggaattcataacagtagcaaaatgacagttatgaagtagcaacaaaagataatttttagctgggagtcttaacatgaggaactgtattaaagggtcacagcattaggaagcctttattaggttatataattttgattttagcttcacttattgtagtaacgattctttttcttctaagatgtcagtttaacacaatgtatggtaaaaattctaaatccttctggaagtgaaataaaacatagaaataatattaaaatcttgttgatgaggggcatgggtacccaagagaagtttttttgtattagagttacaaggaacttacagacctgttctttcacaactaaagattttcaagcacatgggtgaatggtttcttggtttctttgtgctggaatcttgtcataacagattatcacctgataacttagaagttccaagttctgaaagttaggttacaaatgtctttcaagtgacactgtcctgccactccgtttaggggtagagctcaaacaagaaaatgtcagtataaaaaggagtgtggtatggctgggagaaacccttaatatccgttgtgtaatctgtcactcaggtctaatgagcattgtcttcttcagggcctcgaataacagattgggtgaatactgggggaaatggcttgcatttcttccaggatatattaccataggaccaggacaagtttcattctcctgaactgtctgtctttctcactttcccttgttaatagtcagtgggacagagaagcaaccaatgcagcaaataaaatgattcctcgtctgtccctagggccagagttctctgagctgcagatctacgaagggcatgagaaagaggggaaaacagaaaagaaatcatctcagctaattcaattgtgggtttcctcggatcaaagacaaactactagagcataccaagctcaagactttacgcatgggatgctggaggccctctcctcatgatttacattaaggctatatatggtacacatgtggcctccgtggaagtgtatttaaaagacgattttttatcactggcgatctaaggaacagcatccaaggaggtctcattctggtgatgtttaagttctagaaggttggaggaagtgagcaaaatgagtaaacactaaacagcaaaaagaactgaatcccaaagggtcaaaaagaaaataaatcctagaatattatgtaattccattcgaatatgtttgcataaaataaagatatccaagatcttggttctcgtgactaagaaagtgggaaagcatttttaattttggcaagcattatgtatccttttaaagtaatattttaacctttgtcttaatacactgattactggatagatataagtgaaaaatagttaataaacatcatcagggtctatgctcctgacagcaaggactaccttagtcattttcatgccattcttgggtgcaaggctatacacaattgctccaagggaaacagttcaagggaactctagtcttcatatacatagctaactctttacccagcttttacccagaaaagaaccaacaagacaacatatttttgagctcttcaataaacctagaggttccaatattttttattcatctgtggagctagactatagaaagactatagaaaacagaacatctaactgttgtttcctcttcaactactgtccaacaaactgaccatggcacaggtaggattgcccccatcacttaaaaattttcagaataagggaactgaaaacaaaaacccacaaattgacacatctcacctttatctctttcaagttcatcctacttcctttacttcaagaaactaaatattgtcactacacagcctctgaaaaatgcaacatatagaaaaaagtatttctaaccagaagttcattgaaatgtgtggactttgggtctggttaatttcactgcttggagctttttatgtgtaagatctttataataaaattttaatacatattttactaagggaaagaaaacatgccaacaggtcaaacatctacactggaatgttttttttcccatccatttcttttctctctaccttttctccctcttctttcttttcttttttatccttccattttttcttatagttactaatcacccttcattattttttcctgttgttaggaaaattgtccatcacagtttctccctcacagcaatatttaagtgtgtgcatttgtaggtgtctgggagtgtgtgtgagagagagactgtgtgtgtgtgtgtgtgtgtgtgtgtgtgtgtgtgtgtgtgtgtgtgtgtgtatttgtgtatatatactacatgtataactatattatacatgaacatatacagtctgctaagtccatttagtgttgttcatgtgtgtgtatacacacacatgtatgcgcatgtgtgtatagtatatatgcacatatacatatatacgattgaacccttactgttggctaacctgttaggggactcattcttgagaaaaaccttttttctctctctcagcagtccttatttgcctgtagctcttcatttgggaaaggaggtggtcttgtgatatttcccacatttgcactcataattcttaaatttgttctcttcattgtgttctgagtatctcaatattgcagctcacaccttcttatttgcttatctttgtctttgttgtaatgttccagtacctccactttctgcccttctcttgacctgctctattggtgaagcctttcatagttttttttttttttttttgacttactgtgttgacttccaaattaatgcagcagctgaccacataaattttcattatctgccctgcattgcgaccataagctatcatcatcattagtttggggacaaggagtgctcaactatcagctgatagaacattgaaattctgccaagggctcaaaatatttttgaggataagatatagaaatctataaatattttttgactaagaaaaaaagaactgttactataaatctttccgccaaaagttgccgagccccactgccacgtgtgcgctttatgccagccgcccacctgagttaggcccaaatgaatacacagaaacttgtattaggttcaatgctgcttggccaatgactaggattctcatctgttagctcagtcttaactttcataaacctatattttataagacttatcttatcagatgccttactggcgtccctccttgccagtggctcacatcctgccgctggaggaggcgaatggggaaaaaggccccttcctgtttctccttcgcttaaatatgagtctccttgctatgtcacttcctgcctggatcaccacttctctactacatttcccagaatcctctttgactcctagtcctgtctaacttattgtctcattggccaaacagtattttatttaacaatcaataagataaacatacacagtacattccccatcatctcctcttttctgtctaaataaaagaaggataacttatcttttataataactgaagaaaactataaccataactatctgtcttcagttttatcaaagaccacagaaggataatatataaactctagaattggcagagacattcgatacctgggcagtcacccaaagttcctctgtaacgttggggcatccatcttcagcccataggccacagtgtgtctgacacactgctccatttcaacaggaacccttcagcactgtcttgttttgtaagttcagcggtcactttcttgtgggtcctgtatgtccagtttatacagcaacaagcagtctaggcaagagcagtttcttgcacaaatggctaatcttgcaatgttgaaagcaaactccataacgagtttcttcaatgcccatcctcctttctgacgtaattggtgtgccaagagcagttgcgtctcactgccaagaaaaaccctaaaccatttaaatgccatatttctgtaggtctttgaaaggtttgaagaatacctagccatctcaaatacatctctatatctagaaaacctaactaacctaattataagtcctgactattataggtaaaagatctgtataaacacaatacctaaacaagaggagacatatacatatcacaaaattgaccttaaagttgtatcaataaatgaaaatctatacccgtctaacttattgtctcattggccaatcagtattttatttaacaatcaataagataaacatacacagtacattccccatcaaagaaaaagaaagtattgagtattttccaactctacagcctcttccaactgccatttgcttattctcttcatcagtcctgcgtgtcttgggaagggaagttggagttaatgaatcaaggtcctaaagcatcatagcgatgctgtcctttggagcagctatgtagtttctctgcactggggatgttgatatctacccctataatgtgaagtattttctctctactcaatcattttctaaaactttttggtcttaatacaatcttttgttgttggttttgtttttcaagacagggttttttctgcatagctctggctgtcatggaacttgctctgtagactaggctggcgccaaactcataggaatccacctgcctcttcctcccaagtactggaattaaaggcatataacatccccaccaggctacaatctatattcttaatacacttagacacagattgtctcaactacttcccaaaatgtttcatgaggttatggtaggaaattaccatcctctcttcccctactacactactgatgtaaatcacctgtcttattttttacctttttatctttgttattgttttaaaaatcccccttagcattcacccggatatccagagggtataggaaactatcattaatgtaggaagactgaactttggcagtaactaccaattctgcaaagtcaacgtcttattagagcaatttttcatcctttaaaactatgccacgtctcaccatttccactgattttctatttcagttaccttgtcatttttctgaactgatgtaggcatctggtctatgaacctgtaacagaggccacaccccttgggtgtggtttcaggcggatggaagtggagaggagcttgaggtgtggctattcttggtgggctctttctggccggtcagcagttctttgtatttttctgagtaagtgttcctcagtaaacacccatttatcatttatcttgggcctagtgatataattacatcctcaccttcaaactgatgccagaatttagtatatatgatcttgatagtatggggcttttttaatctttatttttattcatgtgtttctgttagtgtatgccatatgagtgcaggtacacatggaggtcaaaagagggcatcagatgcccttgacttggagttaaaggtagttgtgagctaacagtaatgggtactccagtcttctgcaagaacttttaatcactgagccatctttccagcctctatgacagtctgttttataatgtaaaatataatatgactttccactctgaaaagagagtcttcaggggaacatataacttccttctacttaattcattttgtcataactgctcttattgttctggattacacatatgtgcacacatgcatgcaggtacacacacatatcatcttttaatacaacttcaggactgcaatatttagctcagctgtagttaaaaaaaaacccttacatgcagaagagtcaaatataaaaaggaacatatttctccatttagcttacaaatgttacaacaatactacttatacttttagactactctatactcctataagtagccatatgaataataaagctagttcataatataaagaaaataactatttgaaaagatcacctctatagaacactcacttacttagattaatgatgacttgctaacagataacctagttctaaattgtgaagcaagggaaaggcttggtaattccaatggagaaaagaagagacacaagagacagtaatataaaagtttctttaaaagtgaaagcaaattaaactccttgggaaaattgaaaagagaagctgaagattaagaataaagaatatttactgatctgtgctcaaatacacacatattattttcttatgtaactatttacagatttatgagagaagtgtaaggaaatatgttcctttttataatgactcttctgcatgtaaggagggttgttggttttgttttttttttttaactacagctgagctaaatattgcagcaaatagcaggaaacagtagttattgctcatgattgtgaactgggtgggcaggaattcttcattccataaatcatttcagcttgctgctctaattccaaagcaccaaaagactaaaagcagctcaagaaacaaatgtgctttgtgcctcttctatttaaccccttcccagtttaaatagatctttggtgctaaagagtagaattttgttttttggtctgtgtgagtgcgttttgttttattttgtttgtttagttttaaacatcttgatcaatgtttttgatgcaaattattgttttcttatttattttctttgccagtaaaatgcagtaccagggcaagcagcatactgttccctttctttattttggttatttatagtagagacagtatcaacgaaatacgctatgttattttcttcctgattgcttaatgttcatagttcaaaattccagccagtgtcctgaagtggttttgctcttatttaagatttcctgctaaagatgctgtattacagctttgcaaataaatacctccttggcctcatgttgctataaaggcaatttagtaatttaaataaacactctttgccaatctgtttcctctcttctgggagactgaagaagtttacattatacatctagtttcttcccttttttcttaagtgacccttcagtcttcaaccaagagagtttgggggtaagttatatatcatatgtctttcaaggcaaacatggaatgcaatttatgggacaaggttcttatgtaaaaataaaactgcttactaataatgtaatgtcagtgaacacagttttatgatctgtctacagtgttagtaagagatttaattcttttttttttttttgatttttcgagacagggtttctctgtgtagctttggagcctatcctggcactttctctggacaccaggctggcctcgaactcccagagatccacctgtctctacctcctgagggctgggattaaaggcatgtgccaccaacgcccggcgtgagatttaattctgttttgagagtatattgctataattaataaaaatctgtaagtatagtactctatctatacccaggaaattcatgcctcagttatttgtcccactccccacaataattaaaatgaattacatatgactcttccggtatgctaatactgccttcccacctagtgtttgataagcccccagcatgggttgctgatttcacatttataatggttaacagaaagtagcacacaaacgtgaaatgagaagttatcattatccttaaggaaaacttctaattgcctgtggtgaatggagtcacagctgtgttctgttaccatgggagcagcctctggtgctaagtgagcgttagttggttttggtcaatgagtttctgatttgattttcataaatttttagcatcctttgctgttgatttcctctaaaaccatgcaaaaccacactacacagttaaccactgcattctgactttgaaattacataaatacaaattcatcatctttatgtgactgaacttagagtgcatcttatatttcttgacttttttttttttttttttttttggagtgtgaaagttaaagcaatttgaaagggaagcccaaattcagagaaggaaatatggaactacatattcaaacagagttaaatctcagaaatacactgttttccacagtatgaagaggttgtgcaagcatggtctttgtaattaaagatgaatattttgttactactaatttttaaagttagcagcaaagcaatgagattcattgtggcattttcatatgcattatcattacacagtttttaatgtcctacccaaaaccatctgcccttctgttcctggcacattcctcgtcctcagaccctcctaaataataaacccccttcattttatatgagatctagtaccactctctccccaggccggcttctttcagatctcttccaaacatccctgttcttccttctagtttcatgagaacactcacacaaacatacaacacaatacaccagcactcacacacctatgcacatacaaatacatatacacaaaacacatacctaggcacacataaacacaagcaaatacacatgaacacacacacacacacacacacacaaacatatacacccatgcatacacacacatccatgcatacgaacacacacacacaaacacacacccatacacatacagaaatacccacacaaacacacacacactcctatgcacacacacacaaatgcacacaaacacatgcacatgaacacacacaaattcacacaaatacatacatgcatacactcaaatatacatacaaatacatacaaacataacacataagcacacacaaatacacacacatagacatactcacacaaacacaaatatatacagacacacatacacacataaaccacatatgcacaaataccacacacaaacacacatactaacatccacacacatttagatctagacgcaacataggaggaaaagcatgtctttgtctttctgaggctgtcttatttcattacagttctgttcttttcactgtaaatgtcattatttcatatttctttatggctgaaaaattccattgtgtgtatgcaccacattttctttctccgttcatctattgacagaaatctaggttggttccatttttttcactattgtgaataatgcacagtaaacagtttcacatgtatctctgtgacatgctctcacacagcctttcagaaatacaaccaggagtggcatagccttgtcacatgacaattctattttataggggggtaaaggttttcactttgctttgtttgatttttgctttttgttttctagaaacatctacattgactgccataatggctgtaccagtatacatgtctaccagcagtaaatatggggtcctctttgactgcatccagcagcatttgctcctgtgttttcttgatggttgttgttctgactttggtgagatggaatcacaaagcagttttaaatatgtatgtccgtatgcatttgctaagggcattgaatgagttccacattttgttctttatcctttcagagattggatggggctagggacttgatgttcttatagctctttatatattctagctttcaatctgttctttcatagacagttaacaaagatgttttccccttccttaggaagtctttgcatgccagtgaaatcctctttgtcaggttttaggatccttctttgtgctattggaattctttaaagaaagcctatacctctgttttctttagcagctcagagttatttgtctggtcctaggtggaattattttatccattttgatttgattttgttcaggataatatatggatttttcatttatatgtggatgtctagtttgtccagcaccaattgttggactggactttctttcctgtacattttgacaactttattgaaaattcattggctatagctgcatgaatctatttccaggtttactattcaattgtgttgtctatgtgtctattttggtgccagcctcatagttgttattatagctctgtaatataatttgagaccaaatatttcaatatctcatgcattagtctttctgctcagatttgttttggcttcttggggtcttttgtgtttccatattattttttagatttttttctaattttgtgaagaatgtctctggagttgaatctatagttttcgacaatataactgaatttacaatattaattatactaatccttgagcatgggaagtctttccattttctcaagtcttccatttctttgtttagtgtcttaagacttggaagttttctgtgtagatgtccttcaccaccttgtttcaaagccattaagaataggatttttcttcttgtttatctcccagcaagtcactattggtatatagaaaggctgctagtttttgattgttacttttcatcctgttgttttagttaatgtatatgtaaagtataagaattttctgggggaatcttgagagcctttagcatagaacacatacaaatggggatgctttgctgtcatccttcactatttgtatgccttttagttcattcttctttcttttcttttcttttacattcttttttttttttgagacatgacttttctgtgtagctttggagcctgtcctggaactcactctgtagaccagactagcctctaactcacagaggtctgtctgcctctgcctcccatcattttttaaaatttctaactactctagctaatgcttcaaggaccttcaaggacctcttatgtaaaaggggtggctggactccttgtctcaaagattttagaagaaacgctggcaattttctatatttaatataatgatttgttctatatagcttctatatggtcctttgacttttagctttctaggagttttacttgataggaaaattaacattgtccaaggtctttgctgcatctgttaagataatcatgtgattcctgactcatatgtatttgtgtgcttacctttactgatctgtatacattgaggcaaacttccattaccaggatgaaactaattaaatcctggtgtatgagcttatttgttttactgagagcttgcatttcctgataattggactataggtttgtttccttccttccttccttccttctttccttccttccttccttccttcctttcttccttcttctttcctttctttcttctttcctttccttttcttttttccttttccttttctttttttttatttttttatttttttggttttttcgaggcagagtttctctgtggctttggaggctgtcctggaactagttcttgtagaccaggctggtctcaaactcacagagatctgcctgcctctgccttccaagtgctgggattaaaggtgtgtgccaccaccgcccagcctcctttccttttctagttgttgtagtcttatttggtttctgtataactggatttaatgctaagccttgcattcctagtttgtagaatggtctcagtagtattggtgccagctctccctaaatggtttggtagaacatggcaaagaatttgccagctcagcttttctttatgaggagctgtttgctactgcttcagtctttttgcatgtgatgataatttgattcaattttgttaggtcatttatgtctaagaatggagccatttcctctagattttccaggtttgagaactcaagtttcccaaatattctctaatagttttctggattttttcagactcaattgtaatattactgtttacctcaaattttattaatttgtgtcatctctgtttttcatttggttaagttggctaagagtgtatcattcatatttatttcttcaaagaaccaactttttaaaattatcctctgtattgttccttttatcacccatcttgtcaacatcgtctctgagttcattgtattttgctcctattgctttggggctttgactactattgtttcctcaggaatttgaggaatactatttagttatttatttcagatttctttgatgtttctacataagcacatatagccatgaacttttcccttagaactgattcactgaatcacaaaaatcatgatacaatgtgcttttatttttatttgattctaggaattttgcattttcatccctggtttctttaatcactcattcatcattcaagagtacattgctttgtttccaaataaatataatttctattgccattgatttctagttttattctactgtgatctgataagatataataaattattgcaattcttctgtgtctgataagccttaattggtgcctagaacatggtctactttattgaatgtttcttggaatgcctagaagagtatgtttaatatctattgggtgggatattctaaaaatatctattgagttcatttgctttatagtacagcttaacactgacatttttcttgactttcaggtttgacgacagtctcaaaatgagagtagagtattgaaatttcccacggctaaagttaccagagctctctgaccttttgtgcttattagtgtttaataatcaacagagcagaggaaagtcttgatttaattaattatttaattatgtatttaattaattattattttataagtacatcaagcactatgctcacttgcactggagtttcttctcaaacgctcttcatttgataatttcaggtaaaagttgatggatgcaaatgaggtccactcagagtgattcctacaactcttgcacataatcaatagacaggttctttttgttcttgctccagtggccaggctgtgacatgggatactatatgtcatggttggccaatagatacaagaatcaggaagatttggacctgtgggttatgtctcctatccagttaagttctccttcccccaccactggttttcttatcgtcttagttagcattgctgttcctgtgaagagactctatagccacagcaactcttataaagcaaaacatttaattgaggctggctttcagaggttaggtccattatcatcatagtaggaagccaggcagcacggaggcagacaggatgttctagaaggagctgaaagtggaaaggagctacatcttggtcctgcaggcagcagaaagtggtctgaaacactgggtgtggcataagcatatctgagacctcaaagcccactccacagtgacacacttcctccaacaaagccacacctcccaataatgccattccttaggagcttatagaggccagttacattcaaactaccacacttatgatttggttatatttactaatatatttcccttttgtataatttatcttgattgagacatctatcacatccatgtagaaaataattctaagacaaaacctatccatgtatattttggaagataatgatgatgatgacacacgtgtttgtgtattggggtgcatggtttcagtaagagaaaattaaggcaaatatgagctgtgtgctatgaaagtaaagcatggggtctttaatttaatgcaatatgcaataaaagctatgctaaaaaatctttttatattcatctgggaggtttggattcttttttatctttcataattaaatatgtttccaatcctctttatttatgtaagggaagcacaatgttgtaatcaccgtggtctgaagacagctttttttttctttactaaaatggcctatgaagggtagaatagatgggagttttaagtttttaaaaagaagcaggaggaaaggcgagaggaggggatggtagaaaacagtgatgagagaaggcaggcagtagacatgtgtcttgtaagctgttttcccctctgcattgcttcaaggtctaattactcattaactgctgctcatttggaattccctctgctactctctccagttctgaacaatttgtacatgtgcacatttgaattctatttgtcagaaatctgctggtgttaacatgaagggtgaaataccataggaaaattaactaccaatgtacctatgtaaaagtcaaagaaaatacaggtgagtcagctgcactcggagaagttgcccaaggcttagtaactttcccattcattgcttgggcaatgcagagggtgagtgggattgtttcttgctatttgggtgatttttataccctgtgatttgaggtcttcctcagcctgtggctaaatttaatggaacaatacaaaagaaaaccctatcttgactatgttgtcttagtatcttaatgattagcatcaaacccatttggattaataaggattaataacaagtcttcctgtttccagtggtttggcggtagcagttataaaacactggccatagccactactgtgaagaattataagacccacttttaatggacacttagttaagagtcaagcaccgtgcacaggcctttggctaagttgtttcatttcaaccctaggagtgactgtgtgtctttccctcctcaatatgcagaaattaaaattttaggtttatcattattgtagttgagttacatggacagcaacagttgggtgagatatcattgattttagtactccatataccaaaacaatagatctattatttaatagttacaaatgtgtgcatcaggtataaccagttaataggtttctgttttgtgggtgttataaactcagtttcattcatttatttatttactttatctaggaaaataagagacactagatttaaatcactcaacatttatataagccattcaaaattcgatggcagatcaaactaaaattaagtcaaaatagagaactattttttcatgttataaaaaggctgatattttctgaaaaacaaattaatgcccaaatcacagattgtacaagaagcaaagttggggaataaaagttgatttgtctggtctagagtctgcatatacttgagttggtcctgagtaatgagagaaacaatatactttctttgttttttccagcacaaagcaccaaacaaaagtttagggatcggaggtggggagtattgaatgctctatttccacaattgcaaatatctatcaatgtttagattatctgaaaatctactactcgattaaaagtgggttaaagacaagaagctcttttggcccagcactagaaatcctcaatagaaagagggttattcgaataactgacccaactctccacttccactcccctagaagcctcagcaattagctggctttctatcctggccttgtgcctaattggttggctcctgagacatgatatccacattttgacagagttacttctttacaaatatttaatgccacaaacagcgacattttgagagtctattcgatagggtttgggtatagtctgcctcacagtacaactttatgacccaattccctaactcacattttctcaggcagttatttcctgtggaggtttctgcaagtagtcattttttttaggagaatggtagttaaaataatagcacttttaaggaatctgcagtttggtgattaggattgtggccagtgtgcacatttcctgctatctgtgagaatacagaaggcagcattccttcctaattattgcaaaaacaaaacttccttgtcatttttttttttttttgctagaagattgataagtgaacggagccgcagagcatagtgctgggagacattgtgctttcagagaaacagaacaggaaacaaaccaagaaaagcaatcttgatttcctcagacaaactgacagtatgtttagataggagtgatacaatcaaaggtttactgtatcataacaaagaggcctgcgtatgatcaagcctctgaatggtttcttgcaaatgctatttggaagcaatattatttattttgctgtagatgctgaatgaaaaagcgtagttctacaggaggctggtttataatgaagaccagttttgagaacacaaaactaaaacagccttccattttaaacaaatgcagtttaagtttggtgcctgaaaggataatgcgattttatcaaaatgaacacagtatttatatattgggaattcttacaatacaactttatttttctttcccaaacatgtcatccttccttacctattaagaaataaatgcccagggctggagagatggctccacagctgaaaacactgctctctctcctagatgactggtagttcagttcccagtacccatgtctaatggctcacagccttctgtatgtccagctgcaggggatctaatgtcctcttctggcttcttcaggcacaagcacacatgtggcacacacacaaagacacacatgaaagtaaaaataaaccttttacttaaaaaaaaaaactactgtccttcttaataaaagttacacttaattcagccaagcttatggtcattgtactgcctagatcctttccctaactgagtgtcccttttagaatcttatgtgaccgtctgtgccaggtccagtctttaatgtggcctgtcattacgtgtggacattgtgatattgctgagacaaagctcaggtacagaaaatgatcttattgttaggtggtaactacagaggaatgagcaaaccaacatcagcaaaatgattggccataaaaaattcttgccctttggatggaactttggaaataaaaaatcatgcctgccattgtcaagtctgttctctgacactttgcctctcctgtcttgttgtcctgctttctggtgacaagtgaccagctcctctgctgaatctgttttttcctctcttggagcaggtaacttgtgtgagacagcagccaatatcttgagggtggaacacatggcatttacctatactactctgttttaattcatttgaatctttccaacgactggcaagagtccaagcatgaacacggaattcaacagagatctcttatttgtaggaagaaaggaacatatatgctcagttctaataacattgcaataaaaaagaaataagcatattcatgaaaatgggaccctagcataagttatatttgtgtgatcacgggcgctacttatactttttgaataatagcagtagtgtcatttagtcaggtggctggatttttttattgtgatctcaaacttccaagcttctaaaggtgagttacaagtataagaactttccagaccaatactacatgaataatatgaagtttcatctggaaacaattacaaacagattatttttactttatacttttgcttctacttgaattaggtgactctgattctgattatatggcctatcacagaggattgatgagtttggtacctcagccttggtatcaaatcctctattaaagtttccagtatccactcttcttcatgcctgtttgctggtgtttcttagcttgttccttggcttttgtttctctttttcagacctgaggatccaactcaagacttgctatgtgttaggctgttactctatgattgaactacatacatagtcgtcatttccattttatgttgagcttttctcaagattctgtagtatcatcatttctttgggtgatggtttaacagtaggctcctctactcactttcaaacacctcttatgtgcaggacactctacttgagttcttcagactatgtcttactccttcccacagacagaattatagaaataaatagaaagaggtcccagatacaacagtgagaacactaacaacacctcaataaattctgagttcccatcaacaaatgtatagcataatcaataaatggaaatgagcttacaggaacttctctgttgggttgagtgttcattttccttatgttatcatccaagattattgactcagtccaggtcagatctcatcaattgacattttaaatctcagaaccaaagaattctccttcattctcttggctatttgaacaatctaaactaatgtttctgtctggatatagtaacacataactgtaatcccagggctcctgaggctgaggtgaaaggattgtgtgttcaaggctagcatgggtagacgagagcccctgtttcaaaaacactaaggaaaacaaaacaaacaaatcattatgaactcaaataagtgcaaactgaaagctttcaatacacaagcctctttctccccaaactatcagaaccatgaaccttcagaatccctttctaagttatattagctcatataagcaagttaaaatacagtcttgcccttcccaactcaaggagataagagagaaacctaggccttcaccaaagacgtttaagcaataccaagactgtagccaccaatgtgtgcagttctgatggcaacaattgcctgacaagcagttatcaactggcttatgtttcatttgagacagacacaggaacataacttgagacttgaggtgtagaagataaaatgttagttgacctataatgtaagttactaatacttagtaaaagcaggtaacctttcaaataataatcgatataggaagttatattttaattctctataatgtaaaacgtgttctaagaaattgttctttagaagatgatgggtgtgtgtgaatgttcacaggcaagtgatctaacagttgaccattcgatagtgatgaaactaaagatacttccaaggagagcaaatggtagagttctacaggatttgaagtaccaagtagcatcttgaatgttgtatggaactggtagactattataccaaacttgatgatctagtcttggggatgttctatgagaatagggagctgaaatgatatggcatctgtggacttgggtgtacaatcattggctaattcagaaaaattcagaaaggacaatttaccccaaacctcaaactctggtttcgaaaggaaagtttgagaaaaatggatattcttaatgaaaatgacacttcatggaattttttataatagatttagggtattttatatttacttagacatttatctttaatttccttcctctgaaactttaaatcccaactaaccaaccccactgggacaccactacagcagaactgtgggagaatgctttgccaatgaagaaatggagtaagacaatatagatgtctttggggaggagactatattccttttaatggctgtggctgcgttctgaaaagcccctgggcgttttacaaagggtctttttcctgttgctctctatgttcttaatgcagaataatgggtttgttttatctgtgcttaatatcattcagcaatacactgtgaagggcccctgtgaatacaatccaaaagcagtctaatgcaaccaaatagacactggcttcattatagtcttttgttgggacacagttcaacctacagtctggcaatattactgaaagtgggaaatgtactttctcctttctgacactgtaaagatggtgacagcaaattttagactttttttttttgaaaatacatagactttgtttgtaatggtgacagattagattgtgacagaccagcccctctgctgaaaacagcgggaaatccagacaagtattaacaaaaaagcagagaaccacagagcattgaatttgaaaggataaagatggagagaagctatggtagcatcttcttctgtcttgaaaacattaacaatatacagtcttcaatgtgaccacccacctggcaaatgatggagtcacaggaacttgctaagttttatctcctcctgcctttttcatttctctcttagaagtttggccaggtggtggtggctcacacctttcaccccagcactctagaagcagaggcaggcagaactctgagttcaaggccatcctggtctacacagcaagttccaggacagccagggctacacagaaaaatcctgtcttgaaaaaacaaaatcaaacaacaataacaacaaaagttgattctatcttcattactaattataatagcttttgatcactttgaattttatgaataatcagtgattctaattcttcacgtggcttttataatcaattaacaaagtaggaaatagtaatgaggcatatttcaggagttagctttttaagataactaaaagtttaggcttgagtcaaaaagacagaattctgactgtccacctgttgagcttctgtagagttaattagtgatattaacacttattgtgctctattagtataaactctccagaccagtgatgacatacaatactacctaattattattaaaaatgtaaagtttattaattaattagacaaggcagaataagaaataaccatgatatacattttactagatagaataacaatgatttatttttatttcataatgatacaaatgtatggtagataggtagccttgcatacaggcttctaaaccattataaaaaaagaaacattttggttttactcaaaaactacactatccagacagaacaaaacccagtgcagccaaagttcacttttgaaagatagttaaatgatcatattagagaaaaattggatccatactaaacatctgataatagaagaatataaaataagatattgggataacagtaagatcagatttcatatgtgtgcatgcatacatgcatccatgtgtattgttaaacacacatatgaaggtgcctttaatatggaagtaaaatttcttctgtaatatataacacacatgggcaggatggaatttagaatctgttgcagggataagcttatcagattaaacatatcctcttcttggtgattgtttcaggagtgtgcacctgacattgcacacagacctactgtgagtgtgcacacagacctagtgtgagtgtgcactaggacttttacaagacgtttgaaatattttcttccattagaactccagaatccataagtggatgttaaatgttgtgagacttccagcatgctcttaactgactacatttgctttggctattctgtgtcttttgtggtttcctttgaattttaagactgtttttattccatgaaaaatgtaagttggattttcatagagatttcaattgatttatagactgctttaataatataatcatttcacactattaattttataaacccatgaatataagaggccttcccacagtctagaatcttaaaaaattatttttagtcagtgtcttaaagtgtacattggagaaatttatgtgaccaaactaaggatgagaatagtgtggtgaaatcaccccctattatcacaacagtatttctctaacctctgtgtcccgtggcatttgttttatgcaattgggagactgaacacttcgtgaacatgtatttacaattgttacatcttttgattaatcactctccttatttgttagggctatgagacctgctccagcccctatccagggttccaaaggtgaaatgcttctcaggagtgaaggaggggggtaaaagattgtatagtaactgctcacacagtccgagggtcgtgctctttatttcatgtgctctttattctgtttctactcccacaatcctgtcctgcttctgacttccccgagcttcttcttccagcttcttcttctattctaaattctcttctccttcaggagccttgaggtgataaagaagtttctctcattagacaaaaacacattcctagagcaagagataaggagctgagccatttactatgacaacataagggttcatggccatgggagcaaaactataaccagacagggagggcacagtgcccagtaacaactttaagacacggatctattgtgagcagactggcaagtgaagaataggcatgcttttcttaataatcttgttagacatctgtgactctgtccctgtgcaagctgtaaagttttctttttacaaaaagcctttggtctaatttgaacttgctctgagatgaaagtgagctaattgtgtgtagtagcctgagcaagagaacaaggtaggctgttaagagtccacaatccttgtgggacaaatagatccagttatgaagcatgttccaatatatattctatatatcaaaactttatagctaaatgaaaagttatcttccaggccatctacaaatatatgtgcccagtaaacaattaacacatggtaaagctatggtaaaaatcccaccctgtaatgtgagggaaagaattcttcacacaagaatctgcaatgggaacagctgacacattcagaaggcagtactccttatcatcttgcagataaggttgagatatgaatctctaatgacaatgttctttgtcaccttgctacatgagataatgccttttgagagacaagaaatctctgatggattgactcctgaagtatgtgctcaactctcactgtataattctgaggtctgtagcacttactactatgtggtggttgtatttatctcttctgacttaattttggtttgacgtgtattttattagctataagaatagttaaaatggcttctttttagctacctttcactgcatagattttcttccattcttttctcacagcctatgtgtgtcttatagggaaggtatatttgggggtatcatggaacctgggttaagttgtgctgtttcgtgtgtgtgtgtgtgtgtgtgtgtgtgtgtgtgtgtgtgtgtgtgtgctccagtgggccagtctgtctttattggtgatctgaggctgttaacacttaaggttgttattgagagatgtttgttgatttgtgcgattttcttcggggttttctagttggattactgtttgttcccttctttcagtcttattggtcgtagaggttttctggctggctacagttgatgtgttgatgggacagattccattctagctccttttgttcatcttttaaactcatgaaatttaaaaatcagcatcttaaagttgagttgccaaagaaaagaataaaatggtcttttctagggaccaggggcaagagcccatttaagtgtatatgactgttttctccatgtgtccaccagaaataggcagaaatttaagattgcttcattatgcctaggtaatctcattctgcaggagtcaaggaaatagcaatcacaggaaccctgatctaaatgcaagaggttccaggtgcaatcctgacatgtgggttctccaaggtatttagaaaattcatagaatttcacaggaggaacacttcgtgtcattgtagcaagaatacctgttacagtgtttcattaaactggtctaatttatttataatattttttaattgaacatagattcttctctcatacaatatatcccagacactgtgtcctctcccccactcctctcaggcccctcccacttaccctctcctgcaggttcacttccctctgtttcctcttcaaaaaaaaggggggggggcaacaggactggacaaggcaccaacaggaatgtagcaatgtgtggtgagatcatcacctattattaacgcagtacctatctaacctttgtgtccagtggcttttgctttatagaattgggagactgaacatttagtaaccatgtatttataattgttatatcttttgattaattgcagcccttattactatgtggtggttttatttctcttctctgacttaattttggtttgatgtatactttcttagctataaaaaatagttaaaatggctctttttcagcatcttttccctgcatagattttcttccatccttttctcacagcctatgtgccatcttatagggaaggtattgggggggtatcatggaacctgggtttaattgtgctggtgtgtgtgtgtgtgtgtgtgtgtgtgtgtgtgtgttccagtgagttagtctgtctgtctttactgatgagctgaggccatttacaattaagattgttactgagagatgtttactggtttatgtaattttgtttgtttttaaattgcaattacaggcagcctccctgtaacctaatgaaggagacagtaggaacaagaaacactagactctattccaaagaaagaagaaaaactccagaaattcacaaaggaagttaaaggatacaggaaaacgtggagaaaaagataagcaatcaaggataagaaggaggttaagacacagcttccccagtgcgctttcctggcaggaacagggaggcagaaactgcagcctgaaggggagccgtgtgagacatggacagtcatgcgcacaagtccacagttggcgcatgcgtcagacacagctgcggattttggtgagactgtgatttaagtcacaatgtgtcactctatatgactcaaagggcagcagaccggtaccatcttgcagaacacattgttaaaatctgagctacagtggagacccgaggacagggaacgaaacaaccacgggatcagagagtctcaattacgcctgcccagcccagagatgagggtaggttcagtggagaagttgggggaagcagaggggccagaaacttgaagcagaagaatgcaggaagcaggagcctcccctcaggctgcaaagtcgtgtggcttgttcctcagaattgcaacttgccctccaaacccaaacattccttcccaagcaaaggagccactcaggagcttcctgtggtaaacaggaggttaacaaaagaccacatatccaaaaagagtggaagcttcaagattcttgaggcctctaccatcaaataaaaggaagtaaacagttgctgggggtggagattctgagcagccaaactgtggaaaaatggactgtggagatgcctgccccagggttataggttttggggagtcttcacccgtgttgggtggcttgctgaacttttgggttatccctgctcctagtaaataaccctcgccaatatccctgttagtaaacacaataataataataataataataataataataataataataataataatatcctcattggttcactaactgggcattggtgtgaccattactttggtctgtcatggattccccttctatggtaagtaggggtgtgtgtgtgtgtgtgtgtgtgtgtgtgtgtgtgtgtgtgtgtgtgtgtgtgtgttgcatctctccaggaaaaacctatcatacaacagcagtacatgcggaaagaaagatatttccaccttggaagccaggatccaatcttatcagctgagtatatccaggggtatttgatagctctgagcctggagccagcaggtagatcaatccatagagcccttctcttgtctctttcagttcgaaagttggaaatctgtattttgattatttctggttgttaacagacacaccttgccctcccaaatatgtaaacagaaagcaaattggttatttgtgtctcttgcttaagaatgttatttgttcacggtagaatttttgaaaaatacaggaaattttcagaaagcaaaaaattaaaacccagagaacatcactcttaattctactgtgggctttttctggaattttaaataatagatggtactgttggagcttctggatcaaaaattccatggttattcaattatgcaggccaattagaatactggaagtgaggatatagttcagtgataaacccctcagcctttatgtgtaaagtcccgagttaattcccaagcaccgcaagaagaaacacaaagaaaaaaatgctaggcctggatgacacaggactgtattcccatcacttgccaggctgaaggctgaggattcggaagtttaaggtaattctgggctacactgcaaaaccctgtttcagaatctgagcagactgctgcagggacacaatgaaaggggaaggggccctcagccttctaaaatcagctttaagctcccaaacatggaaaccacagagagttaatgataattgacatcatatgtttcttatcaaagcctccccaagaaaagtcgcttaagggaaaattcataaatacttgacttgaccacagtctaccaatcctcttccgcattggagccttcagctaatttgttgacttaattacccaaggcacaggaaggttaaacagagtgataatctgattttccctgattgctcatcactgaagaaagtggcctataggatgcaaaataaacctagaacctcgagctatgtaagatgtagagatgaagcaattatccagatcattcccgcaaagtggactgtttacagtaacccatttatctgagtaagcactcctcctacactctgtctacaggaccagtgctttaatcacatcatctgacctaatggactggtccttatagttgtttagtgtaagctagttatacttagtatcaaatttacaaggagagacactattgcagtagcctataaaatatcatctgatatgatagggatagctgacattttattcaagtaaagaatgagtggtttgtgtttaaataatttagaaaatatgagaacctagaaagaaaatagcatgtggtaaaaaaaaaaaagtgtactgtggtctaatccatatcaaaatgagttcaggagttgaagcttttctacagcatatggaagtttatcccacaccatttcaatggttaatctacattctgatgttttctgattatcaagacatactctcccataaataaatatagggaaaatcagttatcctttttctcttgtttaagaatataacactcattttagaaattttcaaaagcagaaaagcttttaaaaagccaaagtcaccacttttaattctattgtgggcttcttcttcttcttcttcttcttcttcttcttcttcttcttcttcttcttcttcttcttctccttctccttctcctcctcctcctcctcctcctcctcctccttctccttctcctttttctttagaagtttaaataacatatggtgctatttgacaaacaaaaaggaatgcttattcagtcatggaggtgaatgtaaagactggaggagggatgtagttcagtggcagagagttcactttatacactcataaagccctgagctccatctccagccctacaagaattgggagaaactatgccactgggtatggcaagtgctcataattctagcacttctgggactgaggaggaggacagggcgtgtgggaccagcttagactacatagcaaagccctggaaaagaggaggaggaagaggaagaggagaaagacgagggaggagcagggaaaatgttccctgcctcccgcatccaggatgagtctcccacccctgtgcctctggaaacaccctcacagatacatagaagtgcactttattaatctacacacttctcagtctgagaaagttgataatcaagattagatatcacattcttttatatgagtatggtataaatctaattcctattttgaactataaagttatttccattttcattacacacagatcactgttggagtttttgattgtttgagaatttcatgtgcacagatgaaaccacaccccttttcctcctgtttctcttctaccccacaactacttttccctccagatttcatgtgctcttttaaaatccactgagtacccttaacactgcctgtacatgcatgggtataggtccatctgctaaagcatgagtagtcctcgggactcacatccctgcagtaaactgtctctccctctctgtgcagccatcagttctcactagttccttgctgggattcaggatgccttgatcttgtgcagttcttatttgtgtatgaaatccccagccactttgagttcatgtgcaaagtggggtgtgcagagtcatgtcaagcaaagacatttagggtacaggcatcagtacctccggctctcactgtttccctgcctcctttttcacaatgaccactgagccttaggtggaaggggttggatacatctgtcatttaaagctgagaactctacagttttagtctcagcacattcatcagttgtggtgtgtatcactcaccatctagaaaaaaaagaaataagcttctctgatgagggctgagatgtgggtaatctaaggatataatgggaagaacttagggaaccctttactatgtcaattttaaagaaatggatgggcttatcacccagtcagcaatggctcagttaacataaccgttactgttgttaaatattcttaaacgtgtaactgcatgtttgtgtgactatcacttatatttctagagttctagaaatagaaatactagattttttttaaaaaaatgatatttacattgcctttattatgtattagtcagagaaatgccagccacacagctgggaataaggatgtctgttttccacaatgcactttcactaaacaccatttttcccttcaatttctaattgtattagcaatttgatatggaagacttcttttgttttttttttcttagcatgttatggaaagtaagtatttttccatactttgtatttctattttcatattttgcaaatcacctttagaacttttgctctgtgtgatacattttaggttacttcttattcttgaaataccacaataacagaatctcttacccctttctgtagctattttgcaaataattttgttgttgatttgccttgcaatattttttattttatatttcagcccaaaagtttctcttataccactgtgtgtgtgtgtgtgtgtgtgtgtgtgtgtgtatttatgcatgtgtttatgtgtggtgttcatgtgcacatgtatgagtttacatgtgtataagcacacaagtgttcaagttgctcatattttcatgtggaagccagaatttggtgttatgtgtttgtcaaaattgctctcgactgtgtctactaaggtgtggtcactcaccaaaccttgagctcactaatagctagttggtttgttccaggaatctcctgtctctacctctgaagtgctggaattaaagatggctgtcactccacgagcaagtactttatcagttaaactccgacttgtgccatgtgttctttatccactgagccagcttctctagctgcattttttaaagttttcactattgtttctttttcatacttgcttataatttttttcattttcagaatcagttatagatatacttacactttagtctatcacatcttactgttattttaattataaatcattaaaatactgtgcaggaaaaaaaatgaccaccaaagaatcagttgaggtttgattttattaatcatacttttcctgctctgtttcttcacaggttgaccatttgataattaagactttgtactaaaaggcattttaagaagaaacttctctcaaattaataagctgctagaagacatggaataagcttcgtaaattttgagataaaacaatttcaacctagattctttaccaataaactcacattcagactaagtgaaagccttttcctaacacaccataaagggctgagtagctttatacatcagaggattttcccaagaatgtttcatcaagttaaagcataaaatagatttcatctgactctggaggccaagttttcaaggccagggagtgttatgtgtgtccagtttaagaaaccttcgcaatgctgccagcctctcagtgcaagctgtagcttctgacaggggactccattgagtaaagataaaaggtgggtaagacttagcaatggatgaccggatagaaaatatggggtggagggcagaatacctcaagaattaaataatgttaggaacttaagaacaagacattgcttcaaacaagaaactcgagtgaaacattgatggggaagtccttctgtgtatatgttagtcttattggttgataaataaagcactgttggccaataagaaagcaagataggtggagataggagtaaggaggattctgggaaatgtagtaaagacaggagtagccatgtgatcctgggaagaggacgcattctgtcagcatcctcgataagataagtctttataaaatatatagattaatggttatggttgataattaagactaagctagcagaaaagaaatcctggtcattggccagcagcattgtaaataatataagattctgtgtgttctttggtggccctaaagccacaggcagaattcaggcagctagaaaaagagttttcattacaaaacacgattttaattttttaggaaattgataaagcacaaagttgaagccatttaactttggtgctaatgaacaagctccctccttcaacctgtctccaaatggtagcaatgaaactgtaaatgtggaaataagatacttgaatgtcatttaagccaccttatagtatttatatagctataataatagaaaactcacaactgatccccaactttgtaacattcctgtaagaaaacatgtaccaggactttatattgccaggcagttcaaagatgtaagaaaaggaagaagaaaatatgaaaatttataataccaatagacagaaaacacagaatatcgagacaaggttggagcaatggttaaaatgcaataccctcattttacaaagtgagatttgagagatagtctgaaaatttagtgaaataataaaatataacacattaaaagttatgaaagtgtcatgagtaaaatattgataaataagcactgaccactgatatgaatgagtatatgggaaaatgggatagtatggtcaaggaaatcattgctttcataacagcagaacaaagtattttatgaatcagataaagccagaatatatggtcaagaaagaaacaattgcagaattacaaactgaaacatactgtagcatctggaccaagatataaactagctctcatgttcttataagctccactgtgtgttttgttatcagctctctgtaatacttatataaaacacaaacctaaaaataaggaaagaaaagctgtctgacaaatctgaattctggacaaatgtctaaacaccctggaattcgtcttatttttacaatcgtaaagaagtgagagaccacttggggtaaatcaaggtttatacttagttttatccaacatattcattcatttttaagcactttttctcattgccatacacttcacccttctctctgaattattgtcttctttcttctttctaaccttgaatgtaatttgagagtgaaaggcgaaagtcagatctaacttccaggggtggagacgtgctggcaccactaaccaaatggggagggcttctgacgcttgaggaagatgccttcatttcccaggtcctcaaacagtctgctggaagccctgtcattagggccagtggagttaaattgaacataagattaatagtcaagtagaggcaaaaccttgatgcccactgtgcttcgcatgtggctcggggttctttgtgaagctctcacaccgcttcaggcttgatgctttctcatctgggatgcaaagcctgggtggtaatttctgttgggagcaaggtgatggcaaaaatatcacatcaggaaaatagcaagggacgtcagctttattcttctacaccatccaattcttcaactgagactaggaagagagattgattttatagggctttttccttttgttatttgttacccgtcttgtcacacctcttctttcctagaagggaagggggggggtaagggaagtggtgttgccaagcaaggtcagggtttaaaaatatcttgtctttccccaagttctataaaagtatctgcgatcaactgagcaaccaattactgtacaccccaaatgcctgttttcacagttatttttaggggcgagattcagccactacacatcctgtccactcaaaacaacagacagccatcgagggcagctaatgagtaggtagccaaatgacaatgtctcctcacttctgactttccttccacagcccaagtggctgcccgaccgtctccacactggcgtcaaacagtcccctacagtatgcagacagtttaaattattacaaggcaatgttacaagtatggactccggcacaaaatgaagtaattacattcaattagcagttcccaaagcgatggtccaacactaggggctttagatgttgccttttgttgacttacagaagccaggtaatgagtgaaacttcaaagtgcaagggccaaaatgaccgcttaattagtggaagggaaggattgcagtagagagagaaaacacccataattttcttttgttgtaggaatccagagaataagctccatttcccaaataatgacaacggatagtgaaacacagaaatatacttccgattaaatgcctgctaggatgatgttggtggcagaggtgtttctgagggaagtattatttaatgggctgccgtgtctgcatgcctagtgacttatctgcttctgacttgtcactagaagcctaagaaataaatttgaacaatcatagaatttaatttgtgactaacaatcaaagaaggtattaatataatacaattagctgaccaaaagaagctgtgttttataaatcacatgatgtagcatcaagcaagaaaaatcatgatcctttattgtagatgggctacctttgtgagaagagtagtaatgtgtgaacataaatattctgtctgtttctggaaatgtggtcaagattgtgttcctgggaaaaacagaagggtagcagaaattatcatatatatatataatatatatatatatatatatatatgccaagtttgtttcattgtaaacatatgaagagaaaggctcaaggcaaaagttgaaaatgtgcaaataatttaatcacaaaacactcttttcccatgttttggttagttgtaataaatgcccttgtgacttttgtttatacctccaagatccataacgatgaaacacagagccatctgagctttatgaggagagaatgaggtgctgcttatgaatggcttaggacactgttagaaagtacatattatctgaaggaatttgcataacttcaatcactaatttcttctagatgttatccttgacttttattccatacagaagaggaaacagtagtgctaagtggggacataatatggtatcttatatgcattaggcattattgtaacttctagtacacatgactatatgtgtgtggataatagtagagaaatattctcatgctcaggtcacgacctccttctcctcatttagagtcatttacatagctgtcacatgggaaccttaaagactccttcattagttctctgtcctaaacaaggcactgttgagtctatatgtaatcagagtttcttttctgcctggtcccacagcagtgtagccccaaataagcacactgagacatatgattaaactgtttgatttagcctaggcttcttttggctagctttctcttaattattaacccatttctattaatctatgtattgccaccaggctgtggcttacccataatccagcatgttgcacctttggcagcatggcatctccctggcggcccctctccacctcctctccccagtattcttctagtctggtagccccacctatacttcctgtctggctactgactaatcagtgttttattcatcaaccaataagagaaacatagatacagaaggacattttcctttcttaaatgacccataaggtatttttaaagtcaagttttccagggtttaatcttctaatctgatttctagagccacttttctcattaataataaaatatctaacctcactaagagtaagatattttgtctgaaaagtaaagtgttcagtttatgcagctactggtaattaggcatagctggtaaaatttattttctagatatgtcaaagtaagaggaaatgtttctaaagggaagccccaagtacccacctattctccatccatagtctcctcctgaaacagttgggcaattgggtaggtactttggttagtgaaagaaattatgatgtgctctcctccagccttacttttgaactcagtgttcttccagtcttctcttggcggtctggagttttgttgtttattccttattcaattacttcttcatctaaagatacccataatttttttaagaattactttttaatgtaactcattttattacaagcagaggggctctggtatattactttgaagaataattgataagcaattcaagctatgggaatatgtcctaccagcataaaagtaacagattaagaatttatgtataagaaaaagtaggggaaatgatggagaacctcttgttacaggtggtaaggtaaattaactataaagatatctgaaaagccacaaggaatcatatcattaactatttacctaaataaacttataatatgtataattctatttgtgaatgcacatatataatttttaatgaactttctcatcttgaatgataatgcttcctctaagagtcaaagatcacctaacaaaagaatccaatatcagacttgagaaaccctctttgagttgttgaccagggctgtccaagacattcccaaagcatacagccttatttgccctcctggtggaagataagtccctatttctgaagacatcattcatttcaaaaacaggttcaaatacccctgctctgggtctggccgataaattcctcctccatgaggattgactttcatggtaccatgaggcaccatgcaagtttctaagggaggaaggtaaccaaccgtcctacccagctttgacatctatgaaccacagcaactaccagcatggcacaataaccctaagggtgcagtagtggcacacatgccttggaagtaaccagctctctaattggacctaagatcaactcaacaagaaggataccacagctggtactggaaacctagctaaccactcattgctagtgaaaccattggtgttggagaagaatctacaaccactattttactaaaccagaataatccctctcaagaatctaaatatttgtctttataactacagataaatgtcttcacccctcaccaatgaaactcctctgtgacagatagaaaccactacaggaaataacaactaatcaaaatgtcaagtggagcccattcccaatggatatatctataaaacacttacatatctcaggcaacattagaacaacaaggaatattgcaggaggtggaaagactgttaagagccagaggatcaggggtttgctgtgagattgtgtctcctagcaatgtcagaacctacacctataaagtctcaccaacatgactgccaaacccaagttgaacaagaaaggacaacaataatggagaagccaaagtggataggggaagcttaaaaggtctcaactctccacagaactgcagtcaactaagacatgttagaaacgggagaaattgtggtgatatattatttataatttaataaagccactggagatcaaaatgcaaaggtagccacagccacagagccaggcagtggctacatgagagtgaatcagtctaaatgagaaacagagttcacaactttaatcccagcactaggaaggtataaaatgaagaaacaaagggtcgcatgtgagattcagttcagacagagaaagcattatactctggagatttaagaccatccattttggtctgaggtagagataagagccagtggcttagctgttttgcttttctgatcttcagcttgaagcctgaaccccaatatctgtctctgggtttacactgtttatattacattgtctatgttatattctttcccaggaaagaacctgccaatgccaaatgggcagccctgaaaacatacatacaagtatcaatatatgggctgaataggttatatttaggaacatgtgtacatatgtagtaacaatagaaagaatacaaggaaggatatatgagaggatttggagggagaaatgttgtgatgacattataatctcaaacattttaaaaaataatttctgtataaaaatgatgcctgccttattaattgtgataaaacctataatcaatgtctatgaccaaaaataggggcaaatggcagcatattcatatcacaaaatattagaaagctattaagatgaattctgtaaattattaaatatgtatgtcatataatttcttcttttaagaactccaaccctaaagctactccaaagaatgtatacataagttaatgtacatgttatatgatccaggggaaagcagggagaatttataccatagtgctgtgtcttatcacatgaattaatagaaatttatcagtcagttagggtttcctcaactgtaaataaaaccgattttgagcccacaatgatagaatgggatgccatagaaatccacccccttgcacagacaggtggcttcttcagaatcactgatggactgggctctggatcctagggtttctatcctcattgatgattttgagaagcattccctttgcttttcttacactgacaaataattataattcttggtcttttacctacactcctggagcccctgcctattatctcaaaactggaggataaatacataggctaaaaaacaagaaaaacctggaatggtccctcaaaccattgcctcttgcctttacaatatatatttaaaaaggtggggtggtgggaacggagggttgcctcctgctgtggtttgaatgctaaagtgtctcctacagactcaagtgttttttatggctggttccagatagaggtgctgctttggtaggttgtggagcctataggaagtcaagcctggctggagaaaatggattgctgagcgtgggctttcagagttacagtccctcacaaacccagtttccattctgtaaccactaaggggatatgaacagtttcaccacactcaaccaccacagccttgagccattcccgtttccatgtcttcctccccatggtggactgcatcccttcaaacagtgagcaaaaataaccctgtctgcattaacttgcttcttagcatatatttggtcacaacaataatataagaactaatacacctcctctggtttgcagagaactctgctatctcagaagtcgtaagtagaattctctagattcactgcctgaatggagataatgttgtcacacctaaagctggcactatgctaagcattggccatgcttcatgagattggagtacaaattgctttggaccaggagttttcaaagcatagtcaattaaacaactgggagagtctcccgaacccattactaaaataaaaaataagttaattgtttttaatgctagctgggttcatggttgctgtctttgaatatcagtaaatatttttaggatttctactttaattgctaatacagtggataataatgaatatagcacaaaaacacaacattaaaagccattaggaaatggctcaatgggtaaaagtacttgctgtgcaagcatgaagaactgaggtcaaatcctcaggacctacaaaaacgtgatcatggttgtgtgtgtgcctatcactccagtactagtagggcttttcagagacaagatcactgaatcttgctggctaccagcttagttccggattcgatgagagaccctgtctcaaagaaataaggaagtaagctaaagcaggacatcccacttcctttactggcctctgcatagacacacacttgggcaaatgcacccccacacatacacacaaatgtccacatatcccacgcatgtctcacgtatacaaatattgaaacaaaacagggtagtttgtttttattgttgtttatttgtttgttttaggagcctaaaaggtcattgaggagggattattccacaatggaaattcacctctggccctgaggagatgaggcaacctgatctacttcaaagattataacattccatactgttgtttcctcccttttgagttaatccatttgggtgtgtcagtcacctgaccaagagaccagtcctcaggaaggctgccttgctaaggagatgagaggaataattatccccttaatgagatgttctacttttccttcccagaagccctgctctccgtgcagctgcttgcatgcttttcatcatgtagccttgtgacgtatgaccatttttctgagtcctaacttagaaaagcttaagtttctctttcacttttcctcctctctatcttttatgtaagcatgcttttccttaacactttaggcttcctcactctttctttcaagcccctccttcgcctttcacaatgtggctgcttacaaaggagggcagggcatagctctctgtcttacaacatttacaacctgcctgccctgtttttcttcccttaaatgctaataaaaaatttctacttgctttcttctaagtctgtttttaaattattttattaaaaagactaaaaacccaagagggaattgcaattttcccagtaaaataagggacctaatacggggcttcccgaagtttctggtaacaatttaattttgatcttgtctattggcatgtcttatcgtaaacaccttaatataatttgagtgaaaattacctcaagctcttttcttcctaataatggtaaatttaaaggaaattttgtctctgagttgaagattaaaaacttaaaaaattctttcagttaagatggaaaattagaagcaacctagtaaaactgaggattcaggagaaaaatcaatagacaatgtcctataaaagagggagctgaataaaaggttagtaaaactctgctttgcatcgcatttccaactcattatcacagcccaggctgatctctctacccatggtgtagccatccctgtttggtctttgtcactatgcttccaactcctgggtcctggagaagaaacatccacttggcagctactattgacctcatcccatgaggtgtattgtgtgactgggcactgcggggtccaggctcgtgccttgtaatatgtcatctcttgctttcctggctttaggggttgctgatgagaaacctggtgtgtttttgctgttgtttaccttaaggagtgcagcattttttcccttccatcttttaatatagtttcttccttttgaatatttggcatttttgtctataatatgttgctgtttggggttagggttcttagatgcttagctgttcattcatttctctggatttggggaaaattttgttcttattttgtggaataaataatttatacatttgatttttatgctattgtagtgacatcttgtttcaacagtggacttgaggtgatggccacatcctaggggcatggcttcaggtgtgcagaagtgaccccttataaggaacagtagtggtggtagtaggaactccggaaaggcagagactgagtcttcaggagcaggaagactgcgatggttatttactattaattgtgtaagcctttccctaataaatacctgttaatcattcatcttgggtcttgtgggttcatttaaaccccaccttgctggtatcctttcaatcccagatactcttgggtttggtcgactgaaagtgttctggagttcttatatatttgtattgtgcatgtcaatttttgtcctcacgtgtgtctgagtgtattattgtcctccattcttgaaatttgtgattctatttcagcttgtttgcttatttcttagtgatgctttcctttttcccctttcttgattcatttcatcttttgcttccagaattcctggtttttccttcttcagtttcaatttccttgctgaattcatgcttgacatttaaaaaaaaaattccctactgaattgctgaccatttcctccacactgataatgttcttgagtagattctgaattgattctcttactttgttgacgtgtgccatctatgaagccattgattcttctttagtgtaaggtgctgaaacccttttctgacatctgagttgtctcattgtttttgtcttcagcgctgaggagcttcgagcttctacagctactccatatgcttgttcgagcatattttgtgtgtttctctgttgttctttgcacatctgtattttgccctctactttttattagcttccccttccctgctctttttgtttctttgttttcttttccatgagtctttgccttcacttagtgagcctgcttggtgctgtatcagatcaaatgatttaatagaagctgcaagcttgacttggaataaaatgcacttgcctattcacttgtgtttcaacaagacttggaagctgcattactggggtcagggggtgccacctgggaaaaatgcagttcatatgttttttaaagctaaggctatcaattaataataaactaagtaagaaagggggaaagagagagtaaaacatgaatgagagacaaagaatacgggttagaggagtgagaaaataccatcgaatagatggagagaaagagaaatgagtcataaaaaccctgaaagcaaaacaactaaacaaatgaactacaaaagtataaatcaaaagaataaaataaaactaaaaaataagaaataaaatgaaatgaaagacattataacttcagtggtgtttttcttcattggtatgtgtattgtcagttttaattgtcaacttgataagatgcagcatcacagagaaaaggagcctccaagaaatattatctagatcagagtgtctggtgagcaagtctgggggtggaaatgattgctgaatggcaggtgaccatgtctgtgtgtggcaagaatattgattgttgaatgaatggctgatgagcatgtctggtgtactgattgctgaatggttggtgagcatgcctgggagggagctgtttattgccaaatgacttgtgagcatgtgtatgtggggggggtgttatattgattgccttaattggtgtggaaagacccactctaactgggcagcaacttctgtagtaatccagataaagggacatggaaagacaatgattcttgttttatggttgcttgcctttcaccctcactggtaaattcatctgccttgttgctgctactgatgagtccttcactgatgtcacagtctctttgcacttccggtgtggactaaacagtggcagctctccagttctccaggaatcttccaggaccaataaattagaacgtctgaggcatctggtaacatggactgagcaactaacattctctctcacctctcaggcaggagacacccattgttggactactctgattgtatcctgtaagccatgctaataattctcctttaatatgtactcattctattggtttatgtcttctagagaaccctggctaattcgggatgaatctggcttctcctcctctttgttagcaatctctgcagttgggatgatggccactaagttcaataattcaaacaagttgagtaagtatacccttcatgctgagaggtatatctactcagaactcagctttctgtcagagacccctcagtcctgcctggcaggttcagcttcatctctgatacttggggaatcattcctaagactctgagagggcacaggtatatccacttaaacttgcttttatcaccgttggtctctgccactgttggtttcttgctcttgtgtttgtaagtaagactttatcatgtttagaaatggtacctctcaaaaaaagaagaagaagaagatgaagaagaagaagaagaagaagaagaagaagaagaagaagaagaagaagaaggggtacctctcaaatccttgggttggtgtttacccaagcagaggtggggggtgtgaggatgtcttttggagagggggtcctgagactataaaaggaaccacaagaggggaagacaaggtcttaaaggaggcatcagggaggaagaaaaaggcagagaataatagaactcatgtgacctaaaaacagaagggggatggtaagggagaggaagtagaccatgacaagagtctcaagggacaggtagagagagtccagaggagactaataagaacaaagtatatagcaaaatgccagaacgaaaccgtcacattttatgtttagtttaaacaaaacttctaaaagaaaattttgttcagatggtttcttactgaaaatataataaaacggtttgttttttctgaaatgtcttctaataattgaatattgtttgttaaatatagggcagatgtaaaattttatcacattaaatcaatattcctaactggtagaatatttcttttagcactgttcaggcaagggtatgtatgagaaacctttgaagggaagataattaggagctctcgggttctctccaacagtaaggatgaaaatttaacctttggaaaatgccatacaatgtcagcaaagttgttttcctctcacgagcaagtaatctcgtgcaatgaatcatctttactttctaagtttgcatcgctctgggacatattctaaagccactgcttgactatttcttaacattctatttattcagtttgtatttatattcaaaagtgcaattgccttgtggtgtgatatttagcatctatctttgtcaagccaaatttcaatgttatacttccttaaaagtgttagaaagggatttttttcttcttcgatctggaaaaaaatagatatagaagtaagaaaaggtttctttatttataaatgtttatatagaacaatgaaaggacacttttcaaaaattacccagtggtagttccttctatcctcacaacaccatgaaacaagcactatttttgctcctattttacagatgaaaaatggaagcacagagaaattaagtgatttgccaaagataacacaggtttaagtggtacaatttgataagacttgactccagccagtctggtcccagctgacataatttaaaccacagggctttccccatgcttgttcttacacctttccagtttctttcatgatttctggggtttcctttgcaaaggaagatcatttagtgtgtcaaatgtgatggctttttgttttacaatgcagtaagacagaccataagtggtgtgataaaatttaaaaatcaattcttcctgtcaaaaatattgaccaacctgaacttgggaacgaacttctgtaatgtcagccctaaagagactgagacagaaggatcaggagtttgaagccagctggaactatagcagtaccacttcatgtgactcactaaggaaactgtagtcgtgaaccaacacaaaactagattagacctcggctgtcgtagccatcacgctcaaatggggcaagacacggaagtggataagcaggtggtgcatatgctgtgagaaaagtgaagcagaacaaagacacagtgctgagagggcccgacatccacagacggtgttagccaaggctggggagggcgggggagccagccatgcgcatttatcctgggagcgtcgcagcagcaatggaatgttcagcaggatggcacttggaggctacaagaaccagcagaggacaaaagagccagtgtgacaataaggaacatggtgaggaatgtccttagaaggctcctggaagacacagtgctgagaaggccgacatccacagacggtgttagccaaggctggggagggcgggggagccagccatgcacagatatcctgggagcgtcgcagcagcaatggaatgttcagcaggatggcacttggaggctacaagaactagcagaggacaaaagagccagtgtgacaataaggaacatggtgaggaatgtccttagaaggctcctggagactgagtcatgtgggcacttcataggtcatgctacgagcaactttatctcatgaaaatgtggcatgaaatgaaaggagtatatgaagacagcacactgattgctccatggggaggactttacggttctgcctggccagaaataaggaaagtagaactggcatccgaatccttggggaaaggctagcagttgtctatatgacagaggtgggaattctgagaaatgcttcaagtctgacggaatcttgaaggtgcggtcactgagggtgactcaaagttgaggtgtcaacagctggaagagcacaagtgacatgctctaaggtagggaagacccgatgagaatcatgtttgaagagacttttcaaaagatttatgcatgttaatttgtgttgacatattaatttagaattactaatctagcagattgccataaaactaattatttcttattacttttatttattgagaacttcataaacgagtactgcatctatttcactttcagtcttatctccccagtcccactcttcctgtgttcctccctcttccttccaagtttatgaaatatacatatatattcactgtgtgtgtgtgtgtgtgtgtgtgtgtgtgtgtgtgtgtgtgcgtgcgtgtaaaacctactgagtccatttagtattaccaatagacatatacacccatggctgatcacttgggattgtgcaacctatgtagtagcttgtccctggaagaaattaattcctcatctctctacagccattgattacctatagctcttcatctaagggtaggactatgtggaatctcctctgtccatactggcatgtcaactggcattgtcatcatgctggtcttgttcaggtaaccatattgttgagatgttatgggtgctttatccctgtcatgtctaagaaacactgtttagcttctatattttgttccttcttccccagtttttcctaagccctgggtataggagttgcatggcaggtgcatcacctggcactgagcatcccacgatcactccctctctgcattttggccagttgtgggtctctgtagttgtcttctccattgcgaagggaagcttctttggtgtggggtgagagctacccttacctgttgacataaggataaatatttagaatatagttttgaaattacattagtttaggaaaaatgaaagtttttcattcccctttagtggctatgatctctccagccctttacagttagctaggttacaggagcaggcctgagttccctcctattgagcagaccttcagtccaattagacaactgttgattactctcaggataaagatgctgccgttgtaacaatgtgtctttccagtccagtcattgttgggtaggagtaccaatagctcctctcccttagcaggttgctcggcatcttctgataactcaggaacccatcctacataggtttccatgtcagttccagctcaatttctccaagtcttgtgtcttaagtatgtggtagcttcaacaatagtgtcttaccttcaaattctggaacgcaaccaaaggcaatggcaatagcctctattgttcataaaacttactaagtgttgtttcagttttgcatgtcaaaagttgacagtctcactgtgctacagtaaaggtgaatatggtcttctttctggatgttgtagtggtgaaaaaaatctgttttctttcctttctcaacctttataggcttatcaaaccattttttaagtgcatgatccctttctccatcttcaaatccaacaagaatgaccaggtctttgtattagctgctgtgttaaaacagcataaccaagacaacttacagagaaagagtttattattattgcttgctgtcaggagtgttagagcccatagtgatggagacactgtggcagtaggcagcagcatagcatcaggagcagtgaactaagagctcacattttgaactccaagtacaaagcagagagaaagacagagaaactgggaatggcgtgaaattttgaaacatcaaagccctcccccagtgacatactgcctccagtaaaactgaatctcttagacctccccaaacagccaccaactgaggaccaagtgttctaatgcctgagactatgggggaaattcatccaactacctgggttcccatctgtatcacccctactcttctgcttctctcttctgcttttatggcttatataggatgacactgtttaaggtcagctcaccttaatgaaaggtaatgtcagaaattagaacatggatgttctgtgaggagcattgctccgcctcacataggtgtctctctaataaacaaatataatttaatgtagcaaatataccttttgtttagaaatatgtatagaacaagatggaagattaagtagcatttagtcttgctgctcaaagaaaaggccaattgcctaatcagcatttaaaatctttaaattaaataataaacttcactatgtccttacaaattagtaggtatgatggtttaagtgattgcaaatttgttgatcataagattttgtgttaatttttttattcggttaaaccttaaaaattgataattttgaggggaaaaattacttcaaatcacctgaattgtaaccttagttcttatgccatgaaatataagtaatactatgtaatgctttaaagcagtttacaacaaagtataattaataacaatccactggaaaataaatttaaatggttttaccctcagtgaactatggcttatatttaaatatatattttgtcactttttaaaaaaaataaaattagtttcatttttttccttgaagattcacaggtaataaagggcatgaaatgctatgggttattttaatcaaaacacagtctcaaatacattgaaacatattatataaaaacacaaatacaattgaattgtgattcttccttgatacatggaggttcctatgcacaaatttgctgagacactgatatatcttaaagccatttatatatcttaacatcagaaggctactcaaatcttagtaggcttgaagacaatggggctagatcattccttcacagtctgcatacagtaaaggaatggaacataggaatttaatcactggtcagagaaggagacccaagtcacccatccttcagagtctgaggagaggcacttcatcccaagctactaagaagaccactaaatccaatctatctgaagccggtcgtaggaatttatagggattaacaggaggctttccgtaagaacaaagccatgctagtctatgacatgtgacatgtgacactgagcctcttcctggagtaggaagtccaaacaaacctgtcagtcatttggagagaatagatacttcatgggatagctgctgcctattcagattttagggaacagcacaaagcttgcctcaagtgtagatcaatcaggacaagggtcttttggggtacatctgctcctaccccttgatttcagtcctttaaacactgcctactgtatatactacactctacatggtttatttggaatctttccatgaagatcaaaagtctgaggacaagtccttttggtgtttctacttggttgcagttgtctttcaacctggtaaggcatggactccactgcacctgctctccaccttgtagggagttccactgaagggtgaatcctctctacaggaattgttcactgtgttacaccttgcacaggggcattttgggtcttattttctggagcctagaagttctcatgagttttctgatccatgtgagcctccctttccccgtcgtttggagttgtgtctcagcttggtgtaaaacagctatgtaactatgaacattgccaacatgcttgaagaaaagttgtctgtgttgggttagagtgtatgtaacagtaacagaaatgtttatagagtgagcagaaacccaacagaggaaaggatactggaaaacaaagaagatccaacagcctgaagcaacaatgggtacccaaaaggaagcttcagatggggagagtagaggattcagtggtctcaacccaaagcctattttgtcacacacacacacacacacacacacacactcacgcacacacacacacacacacacacactcacgcacatatatatatatttatatatttatatatatttatatatatttatatatatttatatatattatatatttatatatttacacacacatatacatatatacatatatatgtgtatgtgtgtgtaaatgcacatttatccatgtacatttactcctatgcgtttaatgtgtgttcaacttctaagtggctcactaatatgctataaataataggtcagatccctgatactctgtgtatcatatttaatctaccactatattccactgatccctaatgcagtaagccaagtctcattgttagatatttgaatttccagttcaacactaaatatcaccagaattgtcaagcttgtgttggactcatttcattgcctactacaacttcctgagataaatccctgaaagaatagcagtcgagacaaatgacattcctatttctaatataaacagtatgctttgtatttctggtatgaagtgagcatcagctcagtcttcaaaacaagtatcttaaatgaattaacaaaatcatcatttaagatccatcactatcaacttctcatacaaaaatttcaaataaaaacattgcatccttcgactttctaaaattccccactatcaaaatgactagtctgcaaggactaccactcattgcaagggcaaacctggagacccctttggccctcttgtccacaaatgtaaatattatcagactcacagtgagaagaaatacttattctttcctcctctgcttccattataagtaataaaagatgaaataaagaatatagtaaatgataaaatagtacctagttagtaacttctgtgcattatgtactgcgacagctctccatttttttccgtttgtttatcttttattctatcttgatcctcataatacagctatgagttaagtagtgaggtcatttctcattctcagatgtgaaacccagggttagaaacttgttctctttggtaaggagtagagctgagagtcaaagtcagctctgcctggcatctgggaccattctccttttagtaaaattctgtactttcttgatttcttcctagacctattgatagacttagtcctagcatcatcattccttcattcatgcattcattcatttactggggagactgcttagtgtcctatagccagatgtctgccggtcaattatgaagttgtggaaagcacggcagagctactgacctcacggaggttacagcctccgggagacggtggttatttaactggcacagtacattgatctgcgcatgtggaattacagaatacatcattgtgctttctgcaattctggtgttgaactcatttgtattgccctcattacatgaacaaataaatatctgtgcatgtgccaattgccctctgaatattatgaccttcttgatatcatgcatctcatttgtgtgcacacatagtgagttcataaaacatatttgcaaacaattatttaattataactagttcctaagtaacttttgagtccctcttctcatattgtcagtgattaattattttaaagtaaacctgttaattatgtggttatactaatcagcctaattcctaggaattaaaaataacacagtccattcattctcccattcgacaaatatttttgcccacttataagacacaaaagtactactttatgtagggcaggaaggacagaaacaaaatcaaatttaagcgcacgtttaagatttggtacccagtaaaaaatgaaaagtaaatttatagatgacaattcaggaacttatggtatgttgtgtgtgtgtgtgtgtgtgtgtgtgtgtttgtgtgtgtgtgtaaggacttatgtgtccaacctcaaaaaggatgactatgttggaaggaatgggagagtgactcattctagctctttctttcagtcctttttcaaggaaatgctggagcaagaacaaacctttgtattacacagatccacagattacatcaagtctcaggttcaataaggtaactgagcacaatggcatccagaaagtctgatggaaaggctcctgaggatggttgcatggatcctcaggtagagagggcactggacttgagcaaggaaaggccataactgaactctatttttagattcacactgaaaagacgagggtagcttagatgaagacccagagtgaaataggcagagggaggagatcccaaacacatagcaatggcactgtgccccaagggaatatagagtaaacccaaaagatgtccgactctccccatgcagcaccttgacagtagtctggtatcccaatggcaatgtatgtatatttatcaccaaatgattaaagatttgatggttttcttcttctcattctgtaaatgtcaaaatgcatgtatctatggtaagctgaaaatccattttccaatgatcacattaaggcacaagcgattattttatttgtaacttctttttctactcagtgtaacacttctaaatttctcctatagggctttcatgttacattttgttggtctgatacagtggcttaggaattgaacttgagttttaatgattatactgtttatccagtctagaccctatgcatttattctaccaacttggcctgctacatactccagatttctcatagtgttggcaaaatgtatacaagaaacattttaattgaattggatccgaatcaagagtaaatgcaaaaaagctaattttggagggagaaagttttgagtttgagtgtaagtcttaatctttcttttatattttgtgtggccagagtacttatctcatttctatcaggcatattttttccatccacaaagagagattttaaaatctagccacttaaaaatctattttaatccatttaaaatgaaacaaaatacaagctacctgctatagtcccaatgaagattaaatatgactgcccattcaatatatgttaacacattgtattacacaatgaatagcatctattattagggggaagcaattcaagtcttaccagttcttaagttgattgcaaagccttgtacggtatagtatccaagttcactcctctataataaaatttcagaaaatgaaggagcaaatacagactggcctaaaggaaggaagtgaattcttgatgaatgactactccaactaggatatttattccacagaggtaataaaagcaagaggtttcttaaaaagaatgatcagatctggtttgcatttcatcagactgtgttatagagcaaatctgttttactgtttcatttatgtgacatatggtgtgacgagttattgagctgataaattgttttcagtgatttaatcacagtgcaatcattgtactgtatttctgctctcctaattccaaacagacccaagcctttgtccagctgctttcctgtgtgtgccactcctctcggccacagcaacagggctgtcctcttcagactgttggtgtgagactcttggaggcaacagcctgcttatgtcacaaggcacatctgtcactctgtgatttgtgtttctcttcagtttaatactatctgctgcaggcaccaggtctcctttctgtaaaaacaaggagtcaagggactagcttagaaggaggtgcttcaaagatcaaaacaggccagtgacagtgacatgtggggtcatgaattggggatggcagtgtcagatctctcttaaatatggaaactggtgactgtgtagcacaaagggacatggggtatgtccagtcctgatagaaggccagagtttgcaaggtagcctcataccctgaaatgtttacacacacacacacacacacacacacacacacacacacacacacacgcgcgcgcgcgcgcacatgagttctgtagagaatgttactaaatgacccaccattaggatgtgaattctcaaataggactatcagttcagagattcgagcacagctatatgactttcaggttagactgaagaaagcatctgctccaggtactctgagtatctaaactcctggataagatacctagtaagacaggagttaaagagttaaattcaggtttggtaggttagtgattaagtagatattcttatttgaagtttttaataatcatcattttctacaagccttaacaaggtaatgcccctttaattttttactcatatgtaccaggcagtctaatttacttctcactgaaaacatggtagaacttttcactagtgagctacacctctgatacacaatctctttttttttctcatatcgttaggagaaggctataatcatcaactcaagatcctcagagacgctgacagtgcacaagtctgtgcatccagctggtggatgatggaaggagattcaagcccctgtctatttctggatgcctcttagctatgcctctcagtgctctgccttggcgtttaacctcattaatatggagggttgggggatatccctactctacttaggttcaattctctcagccttcacttgtatgattataattatcattctatgtactgaatgggtttgttgtgaagttacacgtggtaaaatataacatcctgtagattattgactggatataagatatggattgaaacaatccagaatatgtttcttgaattgtttgtttattttgttgattgggggagggattgcaggaaagggtgtgatggttaaggatttcagcccaaaataacataatataactttatcctttttcattgggatttgaattatgtatagtccagttttagctattttaacccaatgttctctgcttgtcttagagcctctttttttccaccaactccaagtatatatcactcagagaatgtttgttaatttgttctcttctggtggctgccatccaggcagcattcataagagggaacactcaagttaaaaacctactatgcctactctagccagggggttatgcatgcaaaacaaaaattcatgggaaatttaatctctgataaaaattatagtatttattaatgggaacattttcaaatacaaaagctaaatataaaatcagatgaaaatcattgccttagatctctctgttagttttcttctaagtacaaacatcttcttcctgtggctcagccaacatttccttatctgggaattgaggaaccaatggtacagataacctatcaaggagggcacttaaacaagtctttaaaagttcccctgtcagaatcatttcctttgtgactgggaacaccaggaatgggcagaacagtgtaatgtgagatcttattacaattgtattatggaaaagtctatctggcttagtgaaactagaatgacgcaatctttctggtaattccacgcttgtcacttgtgactgataagctcagccacaatttttaaaatattggtagactgttatttgtgtgatcctaaaagcttacttaaaaatgtagttactgaacttttgctttctaccataacgatttatacaagcaagctaaattcaattatcttttattaaactctaccaaactatgttggcatcatatttagatccactcttctgtcattaaatattgaatgaacaatccccacctttctcttagaaagaaaaaaatgtgttattttctctttgaaaaacgaaaaagaaaagaaaagaaaatttatgaggtgattgtaaaatgaagcaaaaagggtaattcatggggtaatattagcattgaacttaatgcatccatcttgtgctatgaagtccgccatgaatagaaagggtgaaccacagattatcattgcatttctagtgacaaaaagcaacaaactcatcctagtggttatttttaatctcattcaatatcctgctggaatatctgctggcaagtgctgggtggttttttgttttgttttgttttgttttatgtctgtggtatacatttctatttttatttaaattagaaataatcttattctacatatcaaccccaggtccctctccttcccatcccccatgccctcctctaccagatgttttcaggtatgaaaattccctaaagaaaatacaaaattctgtgccagtgtattaaagtccaaaagttatttaagagaagtacatttttgtatttgatattgaaaactaagcacagtttctcctgtaaatcattgtgaaacaatgtctcaataatttcaatagtgatttttactatggtgggttggcaaactgttacaatgaattcattaaggaatcgttatgatgctatatacaaactaagagggaactaggagaagagcgatacaggcaacctgaaagactcacagaagttagtggtcaattaatatttaggtcattcatgaaaactggtaagtttcctagcagaacttactggcattccaaataaagaggaaaaataaatactcacatgcacagataaggagacaaatgctcgtgattctgaagttcaggtttgttacatagattttgtactgagctgacatggtggcatgcacctgcaatttcagctctcaagaagtagaggcaggagcattccccatgagtttaggaccagcttagtccatccaggacttcaaacaagacctttttttttttttttaagtgcaataaatgaagtagagtgagtgggcagaaaggccgttgagaaatagcctaggatgccatgcagaaagaaaacattcacaacctgaaaccactggggaaacgggagacctgtaaattagaaagataaaaaagagttgaggaacgacagcactctaaagaggaaaaaatgagtatgataaccaaggcaagagatggaacctggacagtgctataataggtcaagggaaacaagaatagacctgggagatgtagtactcacaccttgctttattgagacttcacaacgcgtaatgaacacatggagtatatttgtctttctcagatagtttctaattatagatgatttttccccccgggaagcagattttctttacaatatctctgtgtgatttcattttatagacctttagggaggagattttgcactggtttgcttgacgctgttgccttgaaacaaactcatgcagtaaagctggtcttgaacgcactcttatgactgactctggcattgaactcttggtccccctacctctacctcccgagtactggggttacagttgtggaagcaccactgtgcctagtgcttgcttggtttttgttgttgttgttcttgttgttgttgttgttttgttttgttttggttttggttttggtttttggtttttggttttttggggtttttttggttttttggttttttgggttttggggttgtttttaatttaaattagaaacaagattgttttacatgtcaatcccagttccctctccctcccctcctcccctgcccctgactaacacccatatcctttctgctccccagggagagtgaggccttttatagggggggggggtcttcagagtctgtcatatcctttgggatagggcctaggccctcccccatgtgtctaggctcagggagtatctctctatgtggaaggggctcccagagtccatcttatgctagggataagtactgatctactacaagagtcccatggcttcaatgcagaattctaccggaaattcgaagaagagctaatagcaatactcgtcaaatccttccttccacacaatagaagcagaaggttcattgcttgtttttcttaatccttcctgattcttctccttcaaagccatacgtcagtgacagtgtgggacagaggtgacatttgctaccgtgagtgactaataagtgtgcaggcatattattctctttctcttggccattaactatgagggcaaaatgcctggttgttttatcccttcatgataattacattttgagtcttttagcagttcagttgtctatatctgaaagttgtaacaaaaatagtcccttctagtcttctgacatggaaaaaatgaatgctgctagctgttccttcttcccctacagctttccttttcttcctcttttcccagaagtgcttttcacaccaaaggcttttcctgaggacttcttaaccacttcatgccaagagcacacagggaagggacttaagccccagtctgtagtataactcaggaaaatttaagcataccgaccttagcattgaaaaaagctgcctctggtactgtgtttcatttgctcttgtcactctggatcttttcatcacactttaataactcctagtctgatggttcgttgacttttagggcattttccatcacaagttgcaacttgaatggactagaaagggagagaaatcctgtaggaaaggagcagaaaggttggattgtataagttataagggaattaagaaagagatggcagtgttgctctctccaaactctgagtttcaggctgtttaccttctcccctcaattcgtatgttgagatcatagaccatggtgtgatattattgaggaggtaataaggtctgatggagagccctcatggatgccttgtaaaagggactgaagcatcatctcatactcttatggtcccagggatagtaagaaatttctgtgacttataagccagctgacctacagcactttgccatggtaacctgagctgtgataccctgcatatctctaaaacaggacttttggtctttatcctcgtttcttctttactttcaagtgatgatgtgacttgtgaaaaccaagctcctagctaaagaaaatgcttgtttttatggtaatgccttgctctatttgtgacttccaggcactagagaaggctacaatctccttatcacatcatttcactttatggcttttggaaaaatagtgttaaggtacagaattatttaagaacactacagatttttctctgagacactgagtgaggggtagggacatctaccaaggtaaattttaccccaaaacaaggatgttgtaagtaccaggacattccattttagatgtgtaattcaagatgttcttgggtgaaccaggttgaaatattcagtgctaatgtagtccagatattcatttctatggagagagaacactgggctacagatacaaattttagggtaactatatctcaagtaaagcaatgtataatggtttttaaaatacaagttaatcccaagataaaaaggtagtttccccaaatttaattttttccatagcattagattgctatatgaatgaagatacagtcagatatttatatgcaacattatatcagtatattaaagaaggaggaggagaaggttatcattattgttgaagtttgagtatgttcattcccataagaaaaaggcaagcatccgtacatgattttctaaggactgtttattgctcattagcatttccttaacaaaattccacacagtgggtggctttactaccctagactggggttctggttggccacttatatcaagtgagggtaagtttctcctaagaattttccctttgcctggcaggtggttactgtctttgagtgtcttcatgcagcaatccccctatgtgtgtgacttcttgtatgctttctctgtgtgtcccagacccttcttgtaaagactacaatcccaactggtgacctcactttaatttaataatctcaaaaatattatttcccaaagagtctgtcttcttaagctctgggaatttggactatgaattgtaagggtctccaaacagctcataatagaatatctctctgtggcaattcaaagtactttggaattagaatatgtatttctaactccttatcaccagaaaaacagtcaacagttatcaattccaggcaccacagagagcttgatcatgtacttctctgatagaatgttccagtttcttcttatcttgctcaaagtgcagcaaaatttcacaatatcctacagcctcttcttggtgccctcgtcgctttacatttagcctccactcttctgcttgtggatctctactccagccccctagaccaccacatcaggcatcactctttaatattctcagatctgttgctttctgacatcaatgcttttcctccttcttgttctcttcctctgagctatcttcatttatatatgactttctcatgggaacttcctgcgacctatggagtttgcagttttccaccctttttatgttttgtctttctattcccctttggcatttatcactagtatattttgtttttatttaccatgatgcctctctccgacaagtctacctactagattccatcagctttattgattgatgttccctcctcataatacacggcctgcaaagttgcagatgcccaatgaacattttgaccaaaatgaataaaagaacaattgtcattttcttccagcttctcttgtgctcctgataaaaggcaatgctgagaagcccaagtggtcaaaggtaaaggtcttggggaggaaaacaattaggctacactccctgttaatgattgatcttggaaagtctccccactaagcctcaggcgaactcagtgaaactgaaagtaactgccatctttaaagggtgatggatggaagagggttaaatagttagttatcagagtgcacagtacattgtaattctaaacccaatcatgagctcagagctgaaacttgaattgattaaccaggtcaactctggggagggtgcaagtggaagctatcagaaaagcctgctgatgcctaatgcctggaaatagagagcctgtccttacaatatcaagataaaatcatgtttttctgttttctctttcacagtatagggatcatccttggaaccagtaaaaattagtctaatttctgtagctgaattgggctttgaggttgaaaagcaagtaaaaaaatcaagagaattttttctatcactgatttctgcaatatatatatatatatatatatatatatatatatatagtttcagtgtttttagtttcttaacatttccaaaaattcttaaaggtttgtatgagttgaagagatcattaaattgtgctgctgataactcaagttctacaagcaatgtgataaaacccaaactgagacttatcctaaaatacatgtaactattaaagggctgcagataggcctgatatgtaaaaggaaataaatacactctgtgagtcggggtaacatggccacaagatcatgtctgaaagccaaattcctttctttaacactgcatcttctatttacaaatgatgggttcaatcttagtgacactggactctggtcactgggaaggtgccatgttggttaatggtcctctgggaacaacaattatgaaataagtggtgttctgtgaagaatcctcatgacttctatcgaccggtatttgtggggctgtatctgaatttattgcccaacaaactaccatagacaattttgaaggaccaaaactcacccagaactctctgtccctgggcaatccttacagaatgatcattcttctaaagcctttatatttccctagggacttcttcctcttgcttcttcctgaatgaggaagtgtttgtaatctcacctcttaaattacattttaaggcctcgcaaaccacagtagaggaaggaacagagtcagcactaatttcataagctatctataagggaattaattgcaacctgacttacttttctctttagaaagaagttgtaaaagagtcctataaattgtgaagggggaatgatttttttctcaaaagggaagagaatggaaataaaatgttaaaatagcatagattagacgtgactaggatctcctacaaaattaaaccaagagaaagggtagtaaatatcactgaagaaaaatcagtgtgtccaacaaaaaaaaagagaaaaaacaactaaattagtacttttacatatatattttgtataaatacctttaagttaggatccaagagaattcaatagattgaatttagtattcttcagcataattcattttttattctggagatgtattcattgtacatggtgataagtctcacaaagacacatattcaactgtatcatgtacttttggcagattcatctctcctctctatccctcctccttactagtcctccttacccagtctcatttccacatttattttacgtgtatgtgtgtgtgtgtgtgtgtgtgtgtgtgtgtgtgtgtgtgtgtgtgtgtgtgatatatgcacgtgtatgtatgtatataatctaggatccaaattaaagagaaaacatgatatttgcccttctgaatctgacttatttaatatggtaagctccagttatacccattgtcctgggaatgacaatgtctttcctttaatggttaaataaaaattcattgtgcatatacaccagtttctttatccactcatctattgacagacacccaggctagtaccctaagcggctattacaagtagtgctaccatcaaaatagttgtgtggctgtcattgtcctacagagacttagatccctttgagaatctaaggagctatggatggagtgtgtacttagtagttctagtcagaggttttctgagaaagctctgtactgaattccattgtgtctaaatgaattaaatccccatcaccagtgagtgcataaggaagggctccaaactctccacatcctcctcaacatttgttgtcattttgcttcttaatggtggccattctgactgaggtaaaaggtaaagatagtttacttcactaatgtggaatagatctcttaatttcttctgatttttgtttgaagtcttctctatcagatatcagaaagctatgtcaacttgtttgcagcttctattcacttggtaaattattttctgtcctttttctccatctgggagtgtttttcaaagagagatagacattagatatggtttttctgattttgtcagtcagtctttgtctctctatggataaggtgaggccatttgccattatcattgccataatatttttattattgagaggtgatattaactcccatgatttttatttatattttctatggatggttagattactgttcatccttcacatttcccccctattcaccttagtcgtttgctggttcactaagttggatataatagaggccttcctagttcctaggaaattatcttattctttcctgatttcttcttattgaaactcttcatgaagagtattatatcatcagaagattctttgtcaattttaaaatgcaaagtcaccaacttatcagtcttgtgtagcagtcatttacttccagggcttgaactgtatcatgtgtattttaggattgcctgtgagagagctgatgctgttctgttgtgttttctgttgtaagcaaattgacattttccccttacagctttaaatataatttctttgctttgtgcttttgacatattaattgtaaaacagcttacagaggttcttctccatcatgtctacttagggttctaaatgcctcttgttgtttgaatgcccatttccttaccaagatttgaggatttttatgctgtaatttcattgactagattctctttagttctcaattcatcttcttatatctcatggattcttatatttgggttcttgatcatagccccaagttcttaaacacggtagtcatgcttatttatttcttttgggggggttcactatgttctttggatgtccctgaactcattctatagaccaggctggcctctaactcacagagatctgcctgcctctgcctcctgagtgctggaattaatttcttttccttattaacatatgaatgaagttttctttgactttctcctttaactttgatttgtttgtgcttggttaattctactagtgatgctctttttgtatgcatcatatttgattcattgaagttttcatttccaacatctctgatttcttttcaaaacctcagcctccctgttggctttttcttcaatgtttctgaccaatttttaaccaattttctcatcaactttgatgcctttttcttctatgtactcaattttcctctccacattggattgactaagtctgctcttcttttaaatcttctttcagtcaaatgatcatttttacaaggaattttttgaaatcatcatctggcatttacaataataccatatattaaagggtagatgtttgagtagcttctgtttcttcaaaacttagaaataggcagttctacatacatatatcatgtgaattcatgggttcttgcctttcctatggtttaggctgttgcttagcctgcattggacaggcacctcctgtctaccagagctatcttctgcatcttggtggctttccttctttggttattattgccctctgatggccatacctagctatgcagtctttgaggctggaatgttgtctcaggtacttctgcctgagatgagtaactttctaaatggggaggttctcccacataccctacaagtgtgagagatacatacaatgttgtacccatataggtcaagaatctgtcctcataatctcaagattcctgctggagagaagcatctattgctatcacatgtcccctaggatttaatatttggcagcctctcttgcagtgaatgccaaaaggctcccctgcttgacccatctgtttgtttgatgctcaaagtcattgaaccccagaattattttcagttgatgtcactggaggaaggcctgcctacatgcacatttccatctgagttgagcctcctggtgcttgtcagtatttttgccctcttgatcttcaactacctaggtcctttctttattctcagattagggagtaccagtttggctcatggcagcctgagaatggtttgtgatgttcagagttattcactgtgccttacattgttatactttcatttatgcaagtcaaaaaatttaccataggactgatgcagaccccatgaatgtcggtgtcagtgaggagatctcagaaatctatggagccccttgtagtagatcagtacttatccctagcataggaatgggcttaggagcccatcccacatggagggatactccctgggcctagacacaagggggtgggcctatgccctatcccaaaggatatgacagactctgaagatcccctgtggaaggccttaccttccctggggaacagaaagggtatgggataggtagggtgttagttgtggggggcgggacagaacaggaggggagggagaggaaattgggattgacatgtaaaacaatctggtttctaattcaaattaaaaaatggaggaaaaaaaacaatttaccatagatgtgttaaattttttattattattttaagaccccttcatgttttcctactttcaaatcttttgtagaagtatttttccttacagatcacagttcctaacattctactttcttctaatttctcttagagaattgaacacaagccaggtgtggccgtacatgtctataatcaacactagggagtctgaggtaggaggttcacgagttgaaggatggcctagactacatactaaggtccttacctcaagaacagacaataaccaaacctaaacaaacgcatgagttcgtttaatgaattactaaagtctctcacaaaaactcttaacaaaaggtacagttttgtagatgtaacttgataatggttaataaaactaaacagaatttttaaaagattttgtgtcttctcagatttcacaaagcattctattttttcctttttaatttgttctttgagaattttctacagtagatttttagcatattctttcctgtcctcccaggtcatctaccgccatatccacccaaagtcatgttctttctctctctgaaaaaacaaaagaaaaaaggctttcagaaacctgaagtccaatgtgtgttcaccatctactccatagcagggagcctgccttggactgtgatagatacacaaggtatcagtccatggaagaaaacttaatttcccttaggaaaagttatcatttgtaaatagcttttgggcctatttttcttcttttctgctagggtttttgtctagcttgagattatggatatcttgggcatgctgtcacaatgtctgtgagttcatatgtgcatctgccctgttgtatatgggaaaaatgctggttctttaagatcatctgccacctcaggctcttaaaatttgcctgttcaaccaagattcctgagccttgagggaagggctataataaagacatcttatttagggctgagcattccaaggtctttcactcacttcatgttgtccagttttgggtctctgcattattatcatctgttgtaagaaacttctctgctgagagttgagtgatgcattgttctgtgggtatagcaatatgtcattagaagttattttgttgctatattaatttggcagaataatagtattaggttttcacctgagactgtgacctagtctcatgtccttgccctcattaacaaatctgatagagtagaccttaaatccaatccaaaaatggttagttactccactaagattcatgccactactgtgtaggcaggaatatcttgaaggcaggttattattatagatcccagagtttgtatgtagctgagtgagactgatggttacttttagccctgggttgactataacatgatctcacatacaaagagcactaaccagtagggatgaagcttccagttgagtaccagctatatttctccaggttctgtgtcataaatgtgtagtatcttcagcaatggggtcttactgccaaattgtagagagtaaccaatagtattgtataggtgtaatgtttgaggggtctatgggaacctacaccaatgactctgaagatgtaacacattcctcgtactggaggttttatttggtagcatatagtatctagctggagtgttgactccctcatatatggtaactccgtttagattcttttatacgtttatatatttcaggaaacttttgcagcagtaggttttcatatggccttccagaaggcctttagtgtaagccactgctattgcctcctcttctctgccactccatcccctaccatctttaatcctcctgatttagttttccctttatctcgtaataacaatatattctatatcctcttccttggaagaccctttcctgcttcctggtcacttactagctacctaacctctgggatattctaaatgaaacacaaatatctgaagcttaaaattagcatccacatatgtgagaaaatatgcaatgtttatttttctgagccttggttatctcatgcagagtaactccatctagtttcctgcaaatttcataattttggctttcttaaccactgaagaatactacactgtgtaaatataccacatttttattatccactcatcagttgacaggtgaatctaatttttgactattgtaaatggagcagcaatgaacataagaaagtaaatctgtggtaagatggatggtcctttggggataagccagaagtgatatagctagatctggtagcagatctatttctagctttttaaggagcctccacactgttttccatagtggctgtaccagtttgcactcacaccagcaatgaataccgtcccccttcccctatatcctcaccagtgtctgctgtcatttattttgttgatctttagcattctgactgaggtaagatgaaatctcaaagtagttttaatttgcattgccttgactactgaggatgtagaaaacttttatgtgtttctcagtcatttgcatttcatttttgagaactctgtggttagttttattttctagtttttaattgagttgtttctttgatgtccagttttttggtttttggttttggtttggtttggtttagtttggtttatttgttctttgtacattcctagatactaaccttctatcgatgtataatgggtaaacacttttcccgttctctttctcatatgatctatcctctgctgtacagaggttacagtttcattaggtcctgtatgtctgctctatggtgatctattcagaaagtcctttcttttacctgcaagttcaagtgtattccctattttgtcatctattgctttccgggtattgggtcttatgctgaggtctttgattcatttggagttgatatttataatgtgattcattttccttcttctgtatgcagccattcagtcttgctaccaccatttgttgaaggatctgttttttcttcagtgtgcattttttgattctttgtaaaaaaaaaaaaaaaaaaaaaaacaggttttcataggcatatgaagttatgtccaggtctacgattatattcctttgatcaatatgtctatttttacaccagtatcatgcttgttttctattactatgagtctggagtacaacttgaaatcttggacagtgatacctccagcagttcttttatgttcagcattgttttagatatcctgtgtgttttgtctcttcatatgaagtttaacattattttttagtttctgtgaagaatttcattgagattttgattggaaatgcaagcaatctctaggttgcttttgataggatggccattttcacaatactaatcttaccaacccatgcatatggaaggtctctttcctttttctaatgtcttcttcaacttctttcttcgatgtcttagagcttttattatgcaagactttcacttgcttggttagacctacccctggatattttcaaggctattacaaaagatattgcttctctgatttctttcttagtatgtttgtcttttgtatgtagtaaatctagtgactttcatgtgttgattctgtaccttgctactttgctgaaggtatttatcagaagtaaaaatttcctggtagaatcacttgtgccctttatatataacatcatattgtaggaaaataaggattattgaaccttttccttttctatttcgatctccttcgtttctttcagttgtcaagtattataatgaataggtatggagagagtggatatactgaaaggttcaggcattatgctgccctgcctctgttacctggcagaatccactcaggcagtaccctggtcagcccagggttccatgggaactaagtctgcatgcaggtgcagaggacccctttaaaagacagacccctatccacttattcgcttttcttctcttctcccacctgtgctctctctgcccctcttctcctctctttgcccctctgcctcttctctctgcctctctctctatggcaaccggccatggcggtcagccattaaccctgttcctcttctctcttagtctctctactctgccgggcctataataaactggttaatatgtctcatcttgcgcctcttctttatttctaatttaagcaaaagaaaaacatatacttatcctgttcctgatattagtggaaatgccttgaatctctctccatttaggttaatgttggctgaaggttgattgaggtatgccacttgtatctctagggcactgcattttgtcagacttcttttgcatttaaagagatgagcatgtgctttccatcctttagttgctttatgtaatagaataccattattgttttatgttgaaccatccctgcattttttggcatgaaaacaacttagtcattgtggataatctgtttgatatgttcttgaatttggttttcaggcattttgttgagaacttttgaatctgtgcttattagataaattagtctattgtttatttttggttgagtgttcagttttagtatcaaggcaatagcagctttgtaaaaagaatttggaaattttccttcgttttctattttgcaaaataatttggagggtatgggttttaattctattttgaaaatatgataaaattctatgctgaatacatttgacttggcatttttttaagtggggggatttttggtgactgcttccatttcactaggaattaagagtctgattaaattatttcatcttgatttacctttgatggattgtatatataaaaatttcatccatttattttaggtgttccattttaatggaataaggatttttctaagtatgtccttgtaattctcataatttccttggtatctgttgtaatgtctccttttcttctctagttttattaatttggctcctatctcttttcttttggttaacttggcttcaggtttattaaacttgctgattcttttcaaagagccatgtagggagagatcactatgtaactgtactgctgaccacacctgtttgggcgtggccacagttatgtagaagacatgtggactaaagggctgagagagagggcgcaggctctctttcagggttccggtcgggtctcaaaaggctgcagagacaacctgagtgttcggtgtaagtgatttcccacaataaataaccaacatccttcttattccgtgtcctgttataaatcctcttcagagccaactcttcattttatagattctttgtataatatcttatttgttttttgttcattcatttcaaacttgggtttgattacttctcccatatattcttttaggatattgttttttcttgtttttctagagctttcaagggattcattaagttattcaaataatagttctctggtttttaaaaaaaaactgtaagtacttggtgctaagaactttcctcttagaactgccttcattgtgttgcatagattttggaatattacattttaattttcattctacactttaattttcttttgatttctgccttgatccaattttatgcagaatttagttgttttgtttagcttccatggatttatctactttctgtagtttttattgttgatatgcaactttaagccatgttattgggattggaaatgtcattttacatttcctgcatttgttcactgtacattaaagtcattctaattcattgtctggattttaaagacttcactttaattggaatccattgctgtggaatcagtgatttggaaagagtcaagttgccttcatttttcatgtttcttttatttctacatttaggaatactgaaattttattctgttatatgattaggtgattttttttatcaaccgtaatattttgttgaaatattttcaatgttcagatgaaactcagatacagtggtattgaaatatagtttctgaactgggggtttaactcagtaattagattctcaggccatgtgacaggacaaaagtcacggtcataggcaccagtctgcaagccctaactgtggaagcaaccagcactactgagtgggcctgttatggaaatatagcattagacgatttaaaacagttgcaccctcaaggacaataactttggggaaaataaatttaaaaaaggagagtacagtttgcactaagaaattagttaccaagagtaggaaaggaaaaggagaaaaggtgtgtacggagaatattagtactagagcaattcagaaaaaatagaaaaggaaaatcagcaaaaaggaggaacaataaagaggggaagagataactcagcagcaatgaaaactgaaagagattttttttaaatgaagttaggaaactttttaaaaacccagcgtccaggagagtgaggcagggagacctccagaccattttgtgccctataagagagcttgcctccaaaaaggaaaaatcaaaacggtagggagagataaaaagacaggacaaagctcatctaaaaagtcaggtattaagtaagagaagtgtaaaagggccaagctatcatcaactccttttcccactttaaaagaggacatgaacttgaaaacagtaggaatattagaaacacagaaagcctttgaaggaaacaaaggcctagttgtcccagatctcatgtgtgttccaacttcgccaaggtgacgactctgatgtacctgtgaattctaagcacctcattttccttttttatttttcccttccacctcagagcttcaagttcctttatttttaagaccagtgttctaagacagcctgttctctcttgaaatagcttataacctagcaggctaattatcagaattagttcagacataaataatcagattgattgcaatgcattttagatcaaaggtttttagaaaggagaaaacacttatcttattagaattgctggttctttattcagaggttcaaatctgcattagtaaatacacaaaatttagcaaacacccactatttttcaatttcattttctacaaccccaagtccatgatccaccataccaaccttccatctctgtcaatagcttcttcagataaataattttgcacatggctttcccattcatgccatctcttgatttcttcaattaaagtctagcccgaaaccacaacatatttctctagcaatcactgcgctcataaaacatttctgggtatttctgcctctgcaaaactgcctatgccattcagcctttgcaacagatggcttgaaatagcatagcagcagccagctatatcaatgtgagctctttatgctaaaggcactatttaggtgctgagcaaacatataattctcccagaagacatatgaaccaaacgctttttttgagactagataccagaatcctctgcccagtcccatgctctttgctgttatactttggccaaatcctcaaattttgttgcttttatgtatgtcatggtatccagaatacaattgtgtgtgtgtgtgcacattaataaataaatagtaactgaagatattgaaataacaaatctacttggatatgaagacttattatttattttccatatctttcattatggaaaaagtcgagtggtgatcacaaaaaaagattctaaaattccctgtcttgtcacctttgcatgacacttgaggcttatgggaatagccaaataagctaatacttggatttccgggtatgtccccctttaccctatattgcagatacaactttttatactagtcctgaactcttcctttcatatttggcaagaaaccaaggtgtgcaggatgagggacaaaaacagaaattataagaagataattacatgtttgacaacaccagaacaattgctccaagtcctgatatagcgagtaggacggcatgaatcataaggtaaagagcagcttcagagttaagtggctaaccacagaaaaatgcatgggataaaccaataagcccgtgagtgaggcggagaatccacaaatgcacagcatacattatttttaaaaccacttacctgagaatgagagatagtaagtgcaaaattgagaccataaacttttggtttttactctgtgactatattaggaaagctggcaaggggctgtgctaagaataagaaataaaaatgaaaaagtgagtgatgccatatcaagctagatatttaatttacaaaccagccctgaagtaattctcttgttctatttcagcaggctttcttttgtatttcttttgtgtcaataatatgaaagcaaacgaaacagcatttcttgctttaatttagttttacctctcctccatccaactcacccaattctcccctggatgccttgagagaatatatatttatctagtgttgaggtggactgttttgtaagatattcgatgaagattttctataacaacaatttctaggaagatgattaaagaagtccctgcaatgtggcttgctgagttttattgtgtgggaatcaagagtctctagactcagtataggttatgtgaagtttattcggggagaatgcacttacacaagaggctggtgaccacagcaggttccagctctgaggatcctcccaggctgtttcaggtgaccaggccagaagcaagagagaactctgaggtctgagaccccagagctagtcctccctacctcatgttctcacacgtgaccacgctcgtttgggcatggtcagtgctacaggtgtgggcagagtggatatcacactacaattccccttttagtctaaagaaaaggatttaggcttgatacgaaaatacatacaaagatagaaaatatcaagtgtgctctaggagaaggaaaagtaagaacaacacacttaagacctatcaccagtgacgcaactagagcaaatggcaagaactacaaatccagtcctagggtaaaggcataacagagattactatagagttgtcctaaactggaaagtttaagtcttgtatgtaatatttctatctagggagagagaacaatgattgtgacagtctaatctgcaacctcatcaaagacctgagaaggataacaatactaggtagggaaggcagaagtacaggcaagcaacttctaaaaggtgcagcgaagacagaaacagcaggttacctggacagtcaccaaaagtctcacagcagcataggggcaacctgctttggctaaggcctagtatctgactgaccaacacagaagcagggaggtagaaatgctgtcttaccctgacttggtgaggctcaggagtcttctcatttatctcctgcaagcacagtaggacagcatgtccaaagtcagtggtcaaggtaatggtggttctttgcccaagaggccattagccaaggagagaatggactccaaaaggagtgtcatcagtgcccaaaatatttttgggaaagcttggtgctgtcatgaacaattgtgtctcatgtaaacggagtgctaatattaaaacatttgaatgccatattctgcaggtttatgaagtatttgaagatcaaatatctatttctgactaatctcatagataagaaacataggtggtagaagtctgtaattctcagaaacatagttgtacaatggctgagcttctcaaaataatgtaaccaggacaaagacttcaaaaatgtaactatatacatatatataattctcaataacagagatagaaccgaaatgtcttgactagaggtagaactgtaaagtgcaatatgataaaaatatcttaagttgtatcaatatacaaaatgtatacacatcaagatagttttatatttgtgtgcaaaacataaacagaaagaagaccctaaacagtcaacatacaataatctaacaatttaagttgtctgtagctaacagttgctaaagttagttcactagaaaacgtgttaatctacctatatcccatcttaaccatacctttcccatccatagcctaaatttatctaaaagagataccgagtctgagctaatacccaaccctaaacaactaaaaccaaccctatgcaggtgaataatatcccttaaagccaacagtaagggaaaggggtgttgttttcttaggattacttcctgctgaaatggtatgacgagctccatgggttcctgtaggaaaatgtaacatttgtagctagtctctgtgtggcaggagatgcttgactggagttcttatctgaagctctggccagggtgtaataagaaggtgcaccatttcagctagctagtctggagttgtctccagccttatagtcccaaaccagttttagggtggtgtttgttaggtcaggggcatcaagtggaatcaatgaagtggtgccccatcttctttccagagacttcaaagattgctgttaatgttttgtttgctgtggaggacttaaacattaatatcagcacagaaagtttgacttccataggtaaaatacacggaaaggtaccaataggatgaaattaagaatgagggaaattaggattttagagaacacagagataaaacaatactagtcctagattttgttttcttctgtcttacaccaatgccctttggatatgagacagaaactcggaattttatttaaatagcatgtttgaatttggaaaaggaaggccaagtccaactccaaagccaggtttgatttttatgtgaatagagactacaatagtgttgggaagcatggaaccagaagacaagagattaatataaatattttaccatttgtccaatccttctttatatgatggttctttctggatagctatcctgtcttcttcaggcatctacaccttcggtgtctttttgctttttagagatgggttttccttaaagacaagaacaaaacactccccctacctttgtgaggtctccataaaactcgtgatatataccttggtggatgacttatcatttctcctcatcaagaggtttctcctgttcaaattggatcttgatcaactttgatggtatccaaagcttttcttctcctatagaaacaaaggcaaaaaccctaccccactgtaacacatatccttgtttccatactgaggtcaatacatgcttgaaataactggctgatttagttcagaatttttttttctgttgtccagtgttttctgtgactgtttttccctttagactaaaaggggaattatagtcagatatccacccaaatgggcattatcagtgctgtaggtatgggcagggtggatatctcactacagagtttcccttcagtttaatatacagtatcagataaattttacaactttaatggatagtaaagcattggtgcctttctttttttttaattttgttcttttaaactatgcgtgagtgcaggtatccacggagttcagaggcaacagatcctcctgtagctggagttagagccgggtgtgagccatgtgatgtgggtgctgggatctgaacttggatcttttgaaagcaagtcctcctaaccaccaaaccatctctgcagcctctagagtgctgacattttttgtgttaaagtgaatcacagattaaatgggcatcacagatatctatagagcaagttacccaaaccatatagaaacatgttctttccaaaaacctttgtaactttctttaaaatagattatgaaataagagtcaaagtacatcttaacaaatataaaaaagaaaaaagaaatgtttatattctacaacatctgaccacaataggataaagttaaatgctgccaacagtatgagaaactgtaaattatttttaaattcacagagcttgaaaaatattatattaaatgttgattgagtcatcagtgaaatcaagaaggaacttttattcaaatcccagaattgaatgaaaatggaaacacagcaaaataaaacctatagggtacaatgagggaagctaatggctataggtgtccatgggggcctagagtgatggctctgcagtttcgagtgcttgctgctcttatggaggatctggatttggttcctagcaccaatatggtggctcacaactatctgtagctccagttccgatggatctgactcctcttctgatcccactgggctcctgcaatatacatggtgcatgtgggcacactcaggcccatacacatacacatcaaattaaatcaaaaataaattttaaaaagtcatagacatctgaaacgaataaatgacatactttagggccttagaaaggaaagaacaagccaaactgaaataagcaggtgagaagaaataattaagaacagagaagagggttggaaaagtagctcagatgttaagaccacttccttttcttgcagaagacctggattcagcttccatcatcccatggtggctcataatcatcaataattccataggtaccatacatgcacgcatgtgcaaacatctaaacatgcaggtaaatagtgttgggcttctcagctcttgttggtgtggactccctagattctgggggtgtcatattggtctttctgttgttgagtgtgttcttattctgtcatctttccatcccttcttccagtggatgcaggtggcgtctctccctctcttttagtctcctcaagcaaagggcagagggcggaggggggaccaagagtgaggtgtgtctagactcagggtgggccttccagtctgggcaggtctactcctgtcaaggggcagactcaggaagaaggagagtgggtgatggaggaacttggggcaagaagagagcccagactcacctcaggcagcagtcagagggcagagaacggtgtggggacaagggcgaggtgtgtccagactcgtgcccccccccccgcctggggaggtccactcttgttgagggtcaggctcaggaagaaggaggaggggtttattgggggagctggggtcagaggagagcccagactcacctcaggcggcaggcagagggcggaggggggaccaagagtgatgtgtgtccagactcagggtgggccttcccatctgggcagggttagggttagggtttaacaaatttagtcatgtgaaattgagccacatgtctaaaaatacttgactattttcagtagcatctgagcctcgacttaaagagttataaaattacttaggttcttgcacaaaacaagaaaatcagttttcaaaagacaattattacaaaatttaagttatacaactcgcagtacacttatacagaacagtgataaagcagggtgtcttaggatttcgattattgtgaagagacgccatgaccacagcaaatctttactttatgtgtcggcttacagtttcagaggttcagtccattatcataatgatggggaacctggcagtgttcaggcccacatggtgctggcttcctcttgatcagaaggcaacaggaagcagactgtgagactgagcaaagctaaagcaagagagacctcaaagcctggacccacagagacactcttccttcaacaaggccacacctacttcaacaagaccacacctcccaatagtgccattccctatgagcttatgggggccaaatacatttaaactaccacatagggactgtagtcagtagtaggatgcttgcctaggacagtgctgattaagaatcacttgaaagaatttcatcaaactaaaaattttggagcctcttttgagctaatactcccaaaatgtttggttctagacagaagcttcacaattaaaagaaaatgtgctataaatatttctttattggatattgctccatttctaacactccttttgtataatttccatgacaaaaatttgcgtatccatattaatctcaaaatacaaaattgcctttgagtctctgagtgttggtcaaatgtgtggcttctttatgaatgtctgtctagaagtcttaaccctgacatccctctaaataagatttccaaagaggaggaattctagagcacaaattgaaaactaaaccaaatagaaaaaaatgtatcaggcaaaaaccaacataggaaatgcttgtgaagattagcatgcagaaaaacagaaaagttaatggaattggaacactctgtaaggctggaatgttacacaacaaattaaatttgaaattgttctaagggatatggacatgtggaaacaatagaaaccccagctagaaagcagcatatctgttcaatcttgagtagacatgggcattttgtgaattactttatattagaacactaggcaagagaatttgttctatacaagtttactgtctaccttgcttttccacagaaatagtaaaaaattgatattttgtaatagttttcatgtaaatacttataattcttccattatgccatttagagcaatcactccacttgataatttgtgatcagaaactcttagatctaaaataatatctttgaccttttctctagaaactgaagacataatcttgtaaaataccccctctaaatatcatcatttgatttcttttcttagaatatatataataggaatgaggagacaattccatgagtgaagcacttgccatggaactatgagaacttgtgttcaccccacatttacagtcctcatgctcatgtggaatcaatgggaggtggagaccagaggatccccagaacagtttgcctggcacacacacaaacaaacaagggggcgctgtctcaaacaaggtagcaggcaagcactgacctacagtgaagattactctctgactgccacaagcataccatagcatatgcatgtccatcccatgcaatcagagaaagacagagagatcatacatacaaatgttatatatgtatgtatgtatgtgtgcacatatgatttttccatatatatgcggaggttcccttgtgaaattgttgaaaatattaaatgagataacattcctgacactgaggtaacaactgtgcagacacaactaaagcaccttcaacttgggcaaaatcaattctatgtcccatgtaaaagaaggaaagaataacaatcatattggtccctttgtctcatttgatacgcctcccacaatgggaccattcgtgaatataatcgtagcatttgaacacaggtcttttccatgcctgctactttaggaataaattggccattcaacaaagttttggagatttcagacatttcacagaggggagtatactttaggagtttcaagacaatttactatgaatgaagttttttttaagagctacttccagaacctaggtttttgacataacattgatttaaaaaaaaaagtgcctcctggcaatttctattcatcagctatgactctctagacataatagttgcatcttttcctctgttggataggagtgagagaagcctgaataatgaatggtcagtccatggactctttagacatgtggctcaatttcacatgactaaatttgttaaaccctaaccctaaccctgcccagatgggaaggcccaccctgagtctggacacacatcactcttggtcccccctccgccctctgcctgccgcctgaggtgagtctgggctctcctctgaccccagctcccccaataaacccctcctccttcttcctgagcctgaccctcaacaagagtggacctccccaggcgggggggggggcacgagtctggacacacctcgcccttgtccccacaccgttctctgccctctgactgctgcctgaggtgagtctgggctctcttcttgccccaagttcctccatcacccactctccttcttcctgagtctgccccttgacaggagtagacctgcccagactggaaggcccaccctgagtctagacacacctcactcttggtcccccctccgccctctgccctttgcttgaggagactaaaagagagggagagacgccacctgcatccactggaagaagggatggaaagatgacagaataagaacacactcaacaacagaaagaccaatatgacacccccagaatctagggagtccacaccaacaagagctgagaagcccaacactatttacctgcatgtttagatgtttgcacatgcgtgcatgtatggtacctatggaattattgatgattatgagccaccatgggatgatggaagctgaatccaggtcttctgcaagaaaaggaagtggtcttaacatctgagctacttttccaaccctcttctctgttcttaattatttcttctcacctgcttatttcagtttggcttgttctttcctttctaaggccctaaagtatgtcatttattcgtttcagatgtctatgactttttaaaatttatttttgatttaatttgatgtgtatgtgtatgggcctgagtgtgcccacatgcaccatgtatattgcaggagcccagtgggatcagaagaggagtcagatccatcggaactggagctacagatagttgtgagccaccatattggtgctaggaaccaaatccagatcctccataagagcagcaagcactcgaaactgcagagccatcactctaggcccccatggacacctatagccattagcttccctcattgtaccctataggttttattttgctgtgtttccattttcattcaattctgggatttgaataaaagttccttcttgatttcactgatgactcaatcaacatttaatataatatttttcaagctctgtgaatttaaaaataatttacagtttctcatactgttggcagcatttaactttatcctattgtggtcagatgttgtagaatataaacatttcttttttcttttttatatttgttaagatgtactttgactcttatttcataatctattttaaagaaagttacaaaggtttttggaaagaacatgtttctatatggtttgggtaacttgctctatagatatctgtgatgcccatttaatctgtgattcactttaacacaaaaaatgtcagcactctagaggctgcagagatggtttggtggttaggaggacttgctttcaaaagatccaagttcagatcccagcacccacatcacatggctcacacccggctctaactccagctacaggaggatctgttgcctctgaactccgtggatacctgcactcacgcatagtttaaaagaacaaaattaaaaaaaaagaaaggcaccaatgctttactatccattaaagttgtaaaatttatctgatactgtatattaaactgaagggaaactctgtagtgagatatccaccctgcccatacctacagcactgataatgcccatttgggtggatatctgactataattccccttttagtctaaagggaaaaacagtcacagaaaacactggacaacagaaaaaaaaattctgaactaaatcagccagttatttcaagcatgtattgacctcagtatggaaacaaggatatgtgttacagtggggtagggtttttgcctttgtttctataggagaagaaaagctttggataccatcaaagttgatcaagatccaatttgaacaggagaaacctcttgatgaggagaaatgataagtcatccaccaaggtatatatcacgagttttatggagacctcacaaaggtagggggagtgttttgttcttgtctttaaggaaaacccatctctaaaaagcaaaaagacaccgaaggtgtagatgcctgaagaagacaggatagctatccagaaagaaccatcatataaagaaggattggacaaatggtaaaatatttatattaatctcttgtcttctggttccatgcttcccaacactattgtagtctctattcacataaaaatcaaacctggctttggagttggacttggccttccttttccaaattcaaacatgctatttaaataaaattccgagtttctgtctcatatccaaagggcattggtgtaagacagaagaaaacaaaatctaggactagtattgttttatctctgtgttctctaaaatcctaatttccctcattcttaatttcatcctattggtacctttccgtgtattttacctatggaagtcaaactttctgtgctgatattaatgtttaagtcctccacagcaaacaaaacattaacagcaatctttgaagtctctggaaagaagatggggcaccacttcattgattccacttgatgcccctgacctaacaaacaccaccctaaaactggtttgggactataaggctggagacaactccagactagctagctgaaatggtgcaccttcttattacaccctggccagagcttcagataagaactccagtcaagcatctcctgccacacagagactagctacaaatgttacattttcctacaggaacccatggagctcgtcataccatttcagcaggaagtaatcctaagaaaacaacacccctttcccttactgttggctttaagggatattattcacctgcatagggttggttttagttgtttagggttgggtattagctcagactcggtatctcttttagataaatttaggctatggatgggaaaggtatggttaagatgggatataggtagattaacacgttttctagtgaactaactttagcaactgttagctacagacaacttaaattgttagattattgtatgttgactgtttagggtcttctttctgtttatgttttgcacacaaatataaaactatcttgatgtgtatacattttgtatattgtaccacttaagatatttttatcatattgcactttacagttctacctctagtcaagacatttcggttctatctctgttattgagaattatatatatgtatatagttacatttttgaagtctttgtcctggttacattatccaagaatgctgtgagggatgaggagatgtcagaactgcccatctacctagttaatggtattctggcatttcttttgaggacgcctgggatttagaataattttcacatctcaaaaaggggagatcataaattagcactccgtttacatgagacacaattgttcatgacagcaccaagctttcccaaaaatattttgggcactgatgacactccttttggagtccattctctccttggctaatggcctcttgggcaaagaaccaccattaccttgaccactgactttggacatgctgtcctactgtgcttgcaggagataaatgagaagactcctgagcctcaccaagtcagggtaagacagcatttctacctccctgcttctgtgttggtcagtcagatactaggccttagccaaagcaggttgcccctatgctgctgtgagacttttggtgactgtccaggtaacctgctgtttctgtcttcgctgcaccttttagaagttgcttgcctgtacttctgccttccctacctagtattgttatccttctcaggtctttgatgaggttgcagattagactgtcacaatcattgttctctctccctagatagaaatattacatacaagacttaaactttccagtttaggacaactctatagtaatctctgttatgcctttaccctaggactggatttgtagttcttgccatttgctctagttgcgtcactggtgataggtcttaagtgtgttgttcttacttttccttctcctagagcacacttgatattttctatctttgtatgtattttcgtatcaagcctaaatccttttctttagactaaaaggggaattgtagtgtgatatccactctgcccacacctgtagcactgaccatgcccaaacgagcgtggtcacgtgtgagaacatgaggtagggaggactagctctggggtctcagacctcagagttctctcttgcttctggcctggtcacctgaaacagcctgggaggatcctcagagctggaacctgctgtggtcaccagcctcttgtgtaagtgcattctggtattcttgcacttcttttgacctacgctgagtctagagagtgaattttcaccatcacaaaaaaggggagcatggggacattgggataagctctttcttcatctcaaagtggaagggttatatacagtcttcaagactgtcttaaaatgtttccccctctgactagatacgcttaaaatacacctttttttccaggggagacccctatttagtaactggaggagatcacaaactggtttccaagcaatttccataaataattttttaagttttaatgacaaaacaaacaattttcaaagtactgctgcacgtcttgccattaattaaataacatttcattaatttccagtttggatagcttttattacaactaataatggggtacatcttgccaccttgccagctttttcccagcctggtctcatgagtcaacagtcatctctcattctcaggtaagtgttctaaaaataatgttctgctgtgagggcagcatcttcatcccttaacttctctgaccccaagttcctcagttctaaaatgtggacaaaactttacattgctttgtaatttttattgtttgattggtgtccatctactcagaaaatatcaagtatccagcaattaaatggaattgtccctcttgtagccttcttttcataatgaatattgtgtagtgattttggtttttttttccctgtttgtaaatatgattttgttgttttgtttcttataatggttgtcatcacacaatataaattggggtttctacctcctgtcttaagtaacacacttatttgttatcttcccatgacctcaagttattgagaaaaatacaagacatagccatttagttcttttgagtgatcagaactttttccatatcatatggaaaataaataataagtcttcataccaagttcacacacacacacacacacacacacacacacacacacacacacacacacacacacacacaattgtattctggataccatgacatacataaaagcaacaaaatttgaggatttggccaaagtataacagcaaagagcatgggactgggcagaggattctggtatctagtctcaaaaaaagcgtttggttcatatgtcttctgggagaattatatgtttgctcagcacctaaatagtgcctttagcataaagagctcacattgatatagctggctgctgctatgctatttcaagccatctgttgcaaaggctgaatggcataggcagttttgcagaggcagaaatacccagaaatgttttatgagcgcagtgattgctagagaaatatgttgtggtttcgggctagactttaattgaagaaatcaagagatggcatgaatgggaaagccatgtgcaaaattatttatctgaagaagctattgacagagatggaaggttggtatggtggatcatggacttggggttgtagaaaatgaaattgaaaaatagtgggtgtttgctaaattttgtgtatttactaatgcagatttgaacctctgaataaagaaccagcaattctaataagataagtgttttctcctttctaaaaacctttgatctaaaatgcattgcaatcaatctgattatttatgtctgaactaattctgataattagcctgctaggttataagctatttcaagagagaacaggctgtcttagaacactggtcttaaaaataaaggaacttgaagctctgaggtggaagggaaaaataaaaaaggaaaatgaggtgcttagaattcacaggtacatcagagtcgtcaccttggcgaagttggaacacacatgagatctgggacaactaggcctttgtttccttcaaaggctttctgtgtttctaatattcctactgttttcaagttcatgtcctcttttaaagtgggaaaaggagttgatgatagcttggcccttttacacttctcttacttaatacctgactttttagatgagctttgtcctgtctttttatctctccctaccgttttgatttttcctttttggaggcaagctctcttatagggcacaaaatggtctggaggtctccctgcctcactctcctggacgctgggtttttaaaaagtttcctaacttcatttaaaaaaaatctctttcagttttcattgctgctgagttatctcttcccctctttattgttcctcctttttgctgattttccttttctattttttctgaattgctctagtactaatattctccgtacacacattttctccttttcctttcctactcttggtaactaatttcttagtgcaaactgtactctccttttttaaatttattttccccaaagttattgtccttgagggtgcaactgttttaaatcgtctaatgctatatttccataacaggcccactcagtagtgctggttgcttccacagttagggcttgcagactggtgcctatgaccgtgacttttgtcctgtcacatggcctgagaatctaattactgagttaaacccccagttcagaaactatatttcaataccactgtatctgagtttcatctgaacattgaaaatatttcaacaaaatattacggttgataaaaaaaatcacctaatcatataacagaataaaatttcagtattcctaaatgtagaaataaaagaaacatgaaaaatgaaggcaacttgactctttccaaatcactgattccacagcaatggattccaattaaagtgaagtctttaaaatccagacaatgaattagaatgactttaatgtacagtgaacaaatgcaggaaatgtaaaatgacatttccaatcccaataacatggcttaaagttgcatatcaacaataaaaactacagaaagtagataaatccatggaagctaaacaaaacaactaaattctgcataaaattggatcaaggcagaaatcaaaagaaaattaaagtgtagaatgaaaattaaaatgtaatattccaaaatctatgcaacacaatgaaggcagttccagaggagttattcttcagcactgcttacttgtgcaaagctgttacactccaagatattgtttgaataacttatggaatcccttagagtctagaaaaacaagccccttctgttcctattctctaataatgcagaggggtgtttatcccatcagtagaatgaacaaaaaacaaatgagaaatgggcaaagctaaaaatgactttgagttgtgttaagaggatttatagcgacagccaaagagaagatttttaatgtaacacacagctcactctgttatttcccatgaaagatgcattatttgctacagatctgtttctaatcttctttgccacaaatcacctggaagtctgctattaacttttgaaaagatacatatagtgactttttcagatatgaccctcagcaaatacagtcagcaaacatgattagagatcagtgaggtggctcagtagataaggtactttctgcccagtttttatgagacattagtagagatgatactcagtttatttattcaatatatggacacttatatgtgttactggagttgtgggtcaaatccttggtcccaaagatactaagaaattagatttattcctcaatatgtcagttaaagaaatggaaatgcagagaaagggaattcattcaacgtggtcacatttgagaaagaacaaaatgaggtctaatgattctcctattctacctttggggttctgacatgaaactgaagtttagatagagggcaaagatatgtagaatcaaacagccctgatcaggatatgctctcacctcttactcattcatcattttcttggtctcttgctcctgtctctgcaaattgtcagagctgtgtgaaattgcttcagagagaagacttagccctctgactgtcaccagggttccagtctgtctctccttgctgcatgagagctctgggaaatttccaattcccggggatccattatctcaatagcctgatcaccaaagggacccacgtgttttctttagtctgggttctctcctgccaggatggtcacaattcaacacctaaacaatttgtcttgaaatttgcctgtgtctgaaacaaatattacaaaagaacttcagttagtgtgagaaaaccatatgtcaatttctccatcacctttgactttaggtaattttggaaggaaacaagtgagagagagtatattagtatgaagcagaagttgaccttgaacctaccctgctcctgctttaacctccaatgctacaattataggcaagtactcctatgtccagtatgacttggttctgattctgacaactatcttgcttgtctttgtgcagttttatctacagaaatgtggtagtttaaatgagaaatgtccccattaacagatcatgatggcaagtctttaatcccagcacttggaaggcagaggcaagaaatctctgtgactttgaggtcagcctggtctacatagggattttcaggacagctagggctatataaagagatcttgtcccaaaataagcaaaaaaaaaaaaaaaaaaagttaagagggaggaagggaaggagggagggaggaaggggagggagggcccacaggctagtatgtttgaatacttggtcctcagttgatggtgctgctctgggaggttatagaacatttaggatgaggagccttatgaagtacatcactttgggcaggatttaagagtttacagcctcacttccagactgcacactctgctttctatgtagttatcttcactctgctttccgtgtgcaaagctgttacactcgtcttcccgctctcactgatatcccatcattatggactctccctctagaaaaaaaatccaaaataaactcttcattctctagaaaacttgtgttgggggtgtttatcccatcagtagaaaggcaactagcacaagacacagctctctctgtaaatgttatctgttgacatttgcagaagctttaacttaaagagcccaaacagcatctttcttgagctgctaggacacttagagtacagagagtattaaatttaaaaaatggactacgaggaggtctgacttaaaagtcactcatttgtaatcttttagtttcttaaaattggttgcaaagtgttccgtttgtactaactcactgacatctgtcacatacagctccaatgtgggctcaggtctcatctcagcaatgagggattgttgagaccaaatcacagatggctattcagtctcaggttagtccacgaagatcatggtggggagcatggcacaggggatgaggagcaggaaagggagagggagactagaggcctggccggggcttttgaaacctcaaagtctaccccaagagacacacttccttcagcaaggtcacacatcctaatctttcccaaacagttctactaactggagaccaagcattcaaacgtgagtctacggaggtcattcttacccaaaccaccacaatatttatacccttgacaaagaaaaacaggtgaaatcttaattgtcaatccccttttaagagtgtccccatccctcacactaggataagaaaagttgatgactttatcttccggtattggcatagcctctgtggtttataggcaccctaggaatccgtggcacagaatctagtggagaaacaagcatggctctaaaactgtccactgacttttagatgaatactcccaatgtcatagctgttactgagccatgcggagggaaatcccctgactggagctcacaacagtaactttcttggcttttgtgaatttatataaaaactagttactacacaagtttattcagtaaaggaccctaaattgtcagttaagataagtgatgattaatcttgctaaactgatggcatttggaatactgtggcagtccaaatgatacatctaccacaggcccaggcatttgaacacttggcccccagctggtgaagctttttagggaagtttaaaagatgtggtcttgctggagaaagtgtctcactgggaatgggctttgagagaatatggtctcaccccacttccagtttgctctctctgcttcatggttgcagttaatgtgtgatctctcagctttttgcctctgcttgttgtctccttgtcaagacagactctttaacatatctttattcctgtcaggatggttctattttcttacttacagaaacatcagaaatgatttttaaagacaagcaacaacaatagtgaaaggaggcaatggttattggcctaataccaacttgtgcctctggctctgtgctgtctccttcacctttctgttttagtcaccttggatctaagaacaacaggactgatagataaacatctttgtgacaggagactccacccccaaagaactggtgagcctgaagactacacacacacacacacacacacacacacacacacacacacacacacaccctgcatgcacacggaggcaattatccatgagggtgaagccacatgcacaaacaaaaaacaagcagatatattcatcttaggagagccaaatgttcccctctggtggtgataacgttagcttctttgggatcaccttagggcaccaaaactgagacagtgatcaaccacaccatacattgaccagaactgcttaattatgcctactcctcatgcctccattgttctctacttaaatttaaagatcttcgtcagtatccagggtcacagggtttcctcctttgttctttcatccagtgggtcctcattaaataaatctcttcttggtgcctttcaccattagtcatctctttaatttgtatactgggattgtctagcctagcttgttgagatggcaggagcagtaacactggctctgaaaacactagtaataactttaggaacagagagggagaaaaagccctcacggcgtcagtcagaaaagaagagaatggtctcgtgtggctgctagaaacagttttcttcccaggacacttttagatctttccactttgactagcatttgctgtattccatcacttcttggtgaagcagagaaaaatgtttacattcccatggggaaattcccttcaagggaaactctctgatatgtaatttttccatgttggccttcttcttatttctccttgtttgagctctgagacaaatctgagtttgtgccatatgccattgaccgaaaattccaaaattttgtagctggattcttgttactttgttgtttgaattttttgagaccattctggacttaagtagcttttaaagcacacacacacacaagtaaacagaaaattaaaaaaacaaacaggtaaactggaagtgtaactgtggtctgcttttttatatatctttattatctgaacttgaaggctgtttaggcttaagccatctggttttagataggaaaagttaaaattctataagagcaacagtaagaagcaagatgtatataaggagtcaatggtttgggagagacctccattataatttgtgtgtcatgagaaaaattaattctgtgctatcaggaagccccttgggaagaattctagaggactgatccaagtcctgctacaaagccatggataggagagaaacagacctcattttaaattatatttaaggttcattccatgagatggaacctaatactgacatcgtaaataaggccaagagcatgcagcaagataggccctacaatgggaaaacctattattctacttaaaagacatagcaataaacaactcctaatgacatattgctatatctgtagatgagtcagtacgtggctcaacactcaccaaagaagctcctgcagtagatggcagttaacaaagaaacccacaaatggcctatgttgcagagaatgagggtctttgggatgctcggctctaaagaggatgtctatatcacacccctcccctcatacctcggggatttacattggaaaacagggtagaaagactgcagcgccagaagtggtggataactgcaaggaaacagtttccctgacacaacagggtagctgcacatacaaatgaacagaggctgagagagtgtgacagcacgcacaagatctgtgcaagctcaagccagacaaaaccctgtggggggaaagaggaggtggacctgatatctagtaatgaaattggccaggacactcactctacagagcctaatcctacagtatctgaatcagaggaggctaaatggctcacctacctaaaggatgcttttgtttgctttctgattaaaaacaagtcacattcaagtttgcctttggatgaacagactctagtcaaaaggcactcctcagtactgttgggcagtattccctgcattcaaaatctcaccatggcctttgtgggatattgactacagatctcagaatgttgcagttaaatcggtctcgtttctgagtttttcccagaaagcatcactcaagtccttagtcaccttactgaatgagggaatctgttgtcctcttctaagatgcaaatctacaaggaacaaattgtttacctggggtcccagttatgaaatatcaacaagacctaatggataaccaggaaaaaacaatgactgttgctaaagttaagttcccctaggacacaaccaattgaggagttcttggggatggttagctagtagagcatgaggatataaaataaatatttatagctcttcttgggatggatcttgagcccttaactcagccaatagagtagaaaattgcttttaacctttcaaagaccagctggaatctgtactcactttgagactgtctaacttaacaaaaccatttaaactttatgtctaatagtattaataagcaatttgggtgcaagttcttgtttaggtttctagctcacttctcaaaacattttgatcacatagaccaaggttgaccttcttatttctagtgcatagctgaaggatggcctccttatctctagacaatagcatcccattgttatgtgctagaacaaatcgaaagatagttgggctatttattgctgggtatacaccattctggatatagctttactggaaaagaagggaaagactaacactggctaactgctagcaggctgaaaggtatcttgtcagataactctaatgtgacctatcagacaatatcaactttaaatctagccactctgctgcccaaaaagcaggagctagtagccaagcatcaaaactgcaaagttgttgattctgtattcatgggcaatcaaacttgatgagccagctatcaagtcagatacatgggggaactctttagagatggaaggactttctgggtcacagaggatgtcatgctagacatgcaatataactttccaagaagtcatggctcagatcaccacacagaagatacatattttcaaagggctgaattaaaagttcttaccagggcctctaaaactttcatcacagaaaagtcttcacatatgttatgactccaaatacacattttgattgcccatgcccaaagatctatatgaagagagaggagatttctgatctctaataataaagagataaatcattttcaggttacataaaacccctctagagtctgtcctcgcgccaaaagaagtggttctcatactctgtctctgtcatcaaaagggaaactgtcacagcccaagctattgccagctattgaccaggactgtgatttcagtgcccctagtacttaaataaacttgatttcgactttcctgagtcttcaaaggcagacatggagacaagaggatggagtttcaaagaacaggactgccttctcactggaagatgaactctcattgagttgtcttgcttcatgaaaagtttgtttgctgtagctaactgtagtcaccaaggctctcattatgggaaagacacattcactgaatttttaggtcacagctcagctggtcatcattaagtgaggtaactcagacatgcctcccctgtgataagaacaagcccaaaataaaacagtggacaagaattaggagacctggtgtggtagaccatatccctctagactgaccagtagacttcatccagatgactgggctgtgaaaacttctagtatcttctagtcaatggggatatcttttccagttgagttttagaaagctttaggaagctttagaaagttttagaaatctcactaggacagaaaatgtctcagaagtagcaggggttcttctaaagaacaccattcctagttatggtatgcccaactcggttaatagcaaaaaaattcctgtctttgtctccatagtaacaaacagtgaagccaagccctaggaactgataggaaactattaatgaatgatgcctggaggcttcattaagatggaaacagtaagatggaaaagataagctagtgtccatagtctgtaaggttaagatatctttatttagataaataccagccaaatacaggccagagcatgccaggggcagctaggcatgcaggccaaagagaaagggggctcccatgtgccttgcagccccttaaaaccctatcatgcatcatcctgacctcaccttgaccacaccctgacaggtgtggtcaggcacacctgtagccagattctagcaggcatggcttacactgtcccctacaataagccatactctgaaataaattaactaaaatatattaacacactcatttaacataaaatggtccttctcaatactcctccctgcaatagggtggctgctgaagataggctagaattgagctccttgaaaattacctataagaaaccattccagacctctataaaggaactatggtcccacaatgaaactatgataataaatgctgtgtataacaacttaacttagttctagcctctgtacatgagcttgtttttcttaaggtaaggtcctatcctgagatatcatacacccctgtcaactaggaggtcaagtcctattaaagacatggagaaattgtggcccagaagatcaactaatataaagtagatacctaatgacatactcttaaccactcacactttattaaaaacttatgggtcaggttatggtccacagtacgtgagtaaagatggcagcctccataaattacccccctaaccttttatagggccaacagtcatctcatctcacagaacgacaaccaatctggaggaactcaagtatctcttaaaaataatatcaagaaagacagcttatatagtcataaattgtgatttgccactctcaactttgtctttttcttattccagcttagatccattgtaagttgtttgaaaatcagacttgtcttatgaggtctaccagtaggctaattcaatatgcagggaactccctctctctgccactgctggagccttagaaaatccagccagcctgtctatatagcaaagcctctgcaagtttcctggaatcagagagtacattttctttcacctgttcaagaacacctttttccttcctctaagcaagagaatcctaagatgtttctaactgaaacaaaatggcacctatatgacataacaggtgaacaaaatcagccacacctggtataatggagctggatggttagctgcagaaaaaaattaatggttgtcatgggattctccaagtaatagatttgactcttgccctgcaaaagatacatattatgattaactctgatggaatctatatggctcagtggtcagaattactctagggaaacaggcacattctatgccacaaggataactaaggaagggcacctaagtttgcgaagccttccaagatgaatcctctctcacttggcagcactaccttataagtggaacaccatgaaattttaaacaacatagtaaaaggctcctatggttctacctccaggccctcctcaccccaggagctgcttccattgttacagaatcatagctggaggtcttagttaaactacaacatcctcttttaatcaaagcagacggccatgacccacctaaatgaagagactgcacaaattcaccaagtggtcttcctttgctgaatgtccttggatattctgagtgttatccaagagggaattcatgctcttatcaagacaaaaaactgtgcttatatcctcagttttgcaaaagttaattgaagcattgaaagacagtcacacagccacgttgcagtatatactttcagcaactgacttgtcaattccttctcacacttacggctatcatttttcttcactttttttctttttgcttctgtttagctttctgcatttgtaagacttgtacccacacaacccatatcaccatagaaatgctgcatctccagaaaagggcacaggcagcaaaagtttctacactgtcttggtctgacacaaaaatgttcctgcaatgccactggccatccagaagcagtcattaaaggaaataacatttgacccttaatccttcattgaaatgaaatggaggctaaacaggggatttgaaggaggatgcctgccactggcttaattctactctgtccccttctggttctgaatttgccccattatcttttcttttttattatctttgagtcccaggaacaacaaaactgacagataaacatatctctgacaagagactcaaactcacccaagcagctaatgagcctgcagattgcacccaaactggatcagctttctgtgatgggaaggcaatttctggaacagatgtcatcatctcataaaaagagatggcaggggtaacagtcggtaccacgtctcagagccagaacccaggcagtgaccaactagacctctctttgaccaggattataattatgccagcttcccaactcctgtgctccagtgatttctctactccaacctaaagccatgccaataccctgacaattgacttgggatcactggtccttttatttgtctctttatctaatgtggccatgttaactaatctctgcactctgctgttcactatagctagtctcttgaggtggcatattggaatgagaggcaaagcctagactaataggctccttgagcaagcagctgcagtagggtaatggtgtgctatccttcgcagagatcttgatattcttacacagagagaaaaccacacttccctgccaaatttttgaaaagaaaactgatggctgccattaaaacatttggaagcttgtgttttaatgaaaatcatgctatttcagtcatgataaaaaaaaaagcaattgattttcaagtttaacagaatactctatctacctgtgtcctctatcacacagtattttttctgcttgacattttataaattgtttaggagtgggaaagttttgaaatgtaagtttttatttacttactcctttccttaagaagcaggatttagtgtagctcattaaattctaggaatacactagtatatgttataagattatcatttctttgttgctgttttccttttgagacgggttttgctatgcatcacaggctggtctcaaacttgctacatcattcaggcttgtctggaattcatgatcctgtcatagtttcctgagtggaatgggagaatcatggacacatgccatcatgtgcagctacactgactagtttatgagatcagaaatgcttctcaaagggagaacatagaagaatggctaaaacaggtatctgttgaacagacttcctcggttcaaattccagagctttctaccctgccttagctccctgagtaagctatggatttctccgttcttttatttcttcaactatagaatggggttttggaaatagtaacaactgcttttaagcgttgttgagagagttaggcaagtccatgtctgtgacatgtttagaatgatgtctggagtggagtaaggcaaaccagaggctttctagtcagaatgagtagatgtttgcctggagcagaggaggaacagcagagaggcatagcatttgtaaggtttgggaatttaaaacgtggcatgtttaaagagcttcaggagtcccagggagttggagcacacgttcacatctctgggcctgaggctcaagcggtcatggaaagtcagacagttcatagatggggtcttaatctgtgagcctaccacagtgaagttctgtaggggaagctgtagccacgcctgcttaggggctgactacaggtgtgcctgaccaccctgaccacgcctatgagggcatggtcagggtgaagtagagtgagggacattcaggtggcaggctctgttttcgatttcacttttggcttgctgtatagaccgctgcccaccggctggctaggtcgttctgtaagtaaggctttttccctattgaaatcccttgtatttttacctggctccatattggtattttcccacattaaagttctttccatggagcagtcccacacaatgcatgtcctaacttgtgttacaacaaatgcttcttcttgtctctataatctttttttattttaaactatggcagatttttttaaggtttaactatgttaactcaacgcagccattcaattggttttcattttattggttggtttctttcccctactttaaaagtatatttataaccattaaggattgtacaaagagtgaagagagaaatcttggaggcagttccagcctaaagaggtggcgtgtctcttctagttcagaacaatgattacctttcttggttcatgtggttcctgtaaccaaaccattgtcccccaaataagagaaaggctctgtgaacaaacaagtcagttttagctgttttcctaaaaagaacaattgtccctctaagagactcaagaaagactttagaatgactgtgatttcttgtttctcaagcatgtctgtgagtaaatatgttaaaacaaaaagaaaaagcattcatcatttggccattttttgtttaataaaaaatatatatattgtgattccacaagagcaaagaaacaatagacatgcattagtttttgtttcaaaatatttcatttccgaatacctcaggtatatcgttacttctttattcttataactgtggtcagaatgagggagaaaaattacaaatgtttcatatactaagaagttggaatattttagtggctttaattatgtagcctacatgaaataaacagaattttattttaatattttgtttccaagaggagctaaatcatttattcattgacaaataatgactgaacttctcatatgtaccagacattatttaggtcctgcctaaaggaaaacaagacaggcaaagtggctgctctgacggactttgtgtgttagtagaagcagtagactgcttttgacttttgaattaaacacacttatcccttttgtaattgtggtctccctaatctcctgttttcctgtgtatgaacaaatagtactaatacacagctctgtgaaaagtaagcatcaacaagtcccacaaacagtaatgagtgctatggcagcagtcaagcaaggtactgggataaagagttatggtggcatccttagagtgggtgataagaggaaatatccataaattggtgacaacttacaagctaagtaacaagaaagactcaggcaaggacagaatcaaagaactcagagcatcatgtcagaaggtcatgttaagaccccggaaagtccatgttctaaaacagaaagaaaatggaactgaatggagtatagaagacaaagaagcaggcaaccaatgagctcagtgaggcaggtacaatctagctcacaccagattagtgaaattaagagaactctcagtttgataggaagccatgttgcagcagggactaattttacagtgatccacactttaaaatcactcagttggaaagtgaagacattatttgggatgtcagctgagaacttatttaccacacatgtaggacagattgtttcacatttgtctggtaacagaacatgaaggatcaatctgagctgccatggatatgtttcagttccttggtatttttttattttgggtcaatattagcccctgggtagctggccttaggaaaatttaggcagaaggaaggagaaagcccaaggaatcgaaaagatctcttgtcaattgactccttttgcttttaaagcatttatacagaaataccacctaaaatttacatctcagggacctacgtcgtatatatgaccaatactttttctgaggaagactgcttttgagtttcaagttagacacactgattcccttcagaattatggtctccctaatctcctgttttcttgtgtatgaacaaataacaaagtaacagtggtaattagttgtttcataatgctgaaatttaaaatgggaacgagaagatgcacggagaaacacttcacacagcacatgatgaaataagtgctacatacttgaatgtaagcttcatgaaggtaggaaccggttctactgcatgcaagtgctcaataaatatttgttgggtgttggataaataaatgcaagaggtaaactctcatgaagtttagaggttgtggctgcggttgcaccgcaatgggtagagtgtatacgtttgtgttaaaaataaatacacaaggaaagaaacagcagcaacaggctttacaaacatacaattagctgcgcccggattaagctcaccctgcattctctggatttttggaagaaaagtcattgctagtaatgttgtctctggagcatcgccaagactcaaaacataaatttgcttcaaatgatgctctgtgaagacaggataacacagaaggaaaagtactttaactgagaaaactcaagggcttcgtagttcatttaaaaacaaaaagtaaaatatctatggttttatatattttttcatactaagagaataattgataacatatttaagaaaaatggcattatcaactagatgaaaataattattttaagcaataagttataggaaggaggtgatttatttttcataagatccaacagcatatttttggccatcaagccatttctgtgaggtcttgaatttttctttaaatagatacatagaaagtaggagtcaacacccactacctttgctccacctacatctcagttttaagctccttcttttgaagtcttagttttttaatttcttgttatcaaattttgtcttgcagaaataaaaacgatagttaataaaagttttgaaaagatctacttccaatgcccaatcggaagagaaaaactgcaagcataactctcttttcagtaggagccagacacaaggagctcatgagggacatgcaaatggatttatagtttgtttatttaatatctttttgaaattaaaatataactacatctttgtccctttgctttttctccctctaacccctcacatatgtcctctctggctttctcagattcatggcctctctttaattattgttatataatatgtattatgtatagttgtatttatatgtaatatatgttgttatatttaatatatgtgtgcctaaaaatataaatacaatctgctgagtctatataatgtttttttgcatgtatatgatttcaaggctgaccacttggtattggataaccaaatagggggaaggcgctgtttgctagggtatggctatttcttgactatgaagagtcattacaggattttaagaaggacataatgtattcagtttttaggttagaaatatgattctgtctgcaagatatgtatgatttaaggtaagttattaaagaggtagtataaagaagtggggccctgaactagtgaaaaatagtaccgttgtaatagacacctgtgagtgacttcaggttttttccaaaggtagaaattatagtagtaaacaaaaaatggatatgcagaaataaggaagatggaaaataaataaatgtatatattttacaaacaacaattgaatttagccatggaataagtctggaaagaaatataataagtgaagtttagacaggcaaaacatccactcatgctcaagtaaaagacgaatagacagcgaagcttctagagtaagttaagaggtgtatagaaaacacatggggaggggcctaggcccagcacaggaagatttggtggacttggtggaaccctggttgggggccctaccctgcctggggagtggcgggtggatggggtggggggtaggttggaggtgggggagaaggaatgggggtgggggagggagagagggagagggaaagtatatgtgaaaatattaacaatttaataaaattaaaattaagaaaaaaaaaaatagaaaaccaagttaacagtgtacaagtaagtgctttcagcttccagaacaaaggagccatatctggtttaagcagcaaaagaactgatccatcagttgtgtaggcacagaatgccaggacaagggtgagaaatgagacggagtcagctacctaagtttaagtgtgtaagattgaagaaggaggtaatgcctaactttaaaagaaaaaaaaaggccgggtatatcatctaccccaaagagcttgtggttagtggggaaagcgttgaatggattttaatatcatcacagtggtggcagctatgatgcatggcaggtcaggaatctggtgggaaagagagagactaattaggatgctctcgcaatcacttggtgaaagataatgagagtgtttactaagatagcagcagtgggaaggatgtgaggacagagtgaagatatatttagttggttgggtaagaggacagaaagaggaggggtcaaagatgacggctacctccatttgagcaacaggataagaaaaatctttttaaccattttgagcacgggggggggggggaacacatcctaagctcgggccaaataattagaaagaaatgtgaaaaggaaatgtagagtatacattaggagtacgttcagagaaaagagagtccgaggaagtggagagtggtgttaaatgctactggctgtcaagttaagaaccaaaagttccccctctgatttaatggccaagtcgctgggtgaaagcagttccagtggggtggtagagacaaaaaccagactgggtgggaggacgactaagagaggaagtggtaggagtctagacaccctcttcagaaagcttagaaaataataaaaaggagacagacagacggaggcagagaggaagacgaagtaagaaagagaacaaaatgagcctataaaatagatccaacatttcccttgattgagctgttatgtatatatatgaattacatatgcatagtcatgtatgtattattatgctcaaacacatatagattatcacccttataaatatatatgttaatttctatcttatatatttaatttgttttgaatttgtaatagtaacaattttaaattataaaagttgaagattaataataagtagcatcatttagtgttctagtgaacaattttagatgataaaagtggattttaaaagtaatgttacttaaatgatattaaatagcaaaggattactagatcacagttttaatttatagagtatttcaattacatagttttgtcaattaaaaaatcgaagaataaaatactgatgaaaaggaggtagtttgcccccactgcttacattttccatatgttatttattctacaacaataagataattatttccaggctaccatttaccctctgtaggcctctggatgtttcttgtaaatggatttgtatcttatggtttgtgtgttaagtatttctttagagtaggatttatatgcttgagatcaccattcatggaacgtaagagtgccctcaatgggcaaaacacaaataacttcaccttttaacaaaacaaaaagataatttcatgtattctagaatgaagtcttctaagtccatgtttccaactttgtcttgttagtttacctatcaccaatacctaaccatgtctctgtccactatgtgcctgggactgtacagatactagggggcccatgaatacacacatccaatacctgtgcagcctccagggtttctaaaccacaaatcagacctgtaaataaattccatatgaatgctttccttaccagcccaaacacagaaacccataccatgttatactccttctctggctttgacatttcacactcaatcatagggctcagtgctcctatgggtttttttttttaatggatttattcagctggtgcatatcaggagggacttgaagatgaagtaactcccctggacaaataggacaggaattccatgagatggagacgggagaggtgtaaaggtgcttgagagtcatcctcagctttgattgtaaagctctaagtgaaaaaggtcaaaagttgttctggttttcatgtctcttgcttggcattatgggtttaggtccctcctggcaactggcaaaacagttttgccaggagctcttaggaaatcctgcactttgcaaggctggtgtggcaccagctctgagaaggaaggacagaagggcagaggagaacatcaagcttacagaaactggggtctgctgcagctgctccctatgccccgttcaccttgtcaactctcgctctctgtggaggtagcgtctttctataggcctatgctcatgtttcctctgagttccagggcctttgagccagctccctaacttcctgcgtctacgttggcataggcattaggatgaatttgttcagaaaggggctggtgaggggaagaaggaaggaaaaggggggaagtagaagggaaaggacaattgaaaaagaaacaaagaaacagaaaatgaaggagttttcagttacttccttaaagctttcttgccattaaaatatctttcccagtcataagccctctatagtttccttgagccttcacagtatagaaaaatctgttaagatcaaggatatgcagtctgaaagatctagactctagcttcttcagtttcacttactgcatctatggcactgggggaaataatctttcaactgctgagttattaagtgtgtgtgtgtgtgtgtgtgtgtgtgtgtgtgtgtgtgtgtgtgtgtgtgtctgtgtgtgtgtctgtgtgtgtgtgtgtgtgtgtgtgtgtgtgtgtgtgtgtgagagagagagagagagagagagagagagagagagagagagagagagtgatttcactggcaaaataattgatgcaattgaaaagaaatccagttcaaactatcttgctcggaaattttggggatgttgaatttgatcctataaaagaaagcatagaatccaaaaggatagaatccaaggactagctttcctgttgagacatttcttatttctattgcttttttgtgtgttggtttcatttcttttatcttaattggtctttctctatgagaaaaggaacccaacattagcatcccatcagcttcaacagaaactcatgctctctttatcaacaacaaggaaaagacttaggaatggatgtacattttggcctcactcgggccatctgtccatccttaagtgaaccactgtggccaaaggtctgagacattatgtctaaattatatcccttcttgtggccaggattatgttgtcagttacagaggcttaccacccaaacccagacaatggtcactgtccaacccatacagtttatgtgagacttggctatctgtaaaaatacaagcaatgcatgtgtgcatgtgtgcatgtatgtgtctgtgtgcgcgtgcgtgcgtgcgtgcgtgtgtgtgtgtgtgtgtgtgtgtgtgtgtgtgtgtgtgtgtgtaacaaaagaactagggaaaattccattgtccttaaaacttcttaagggttattttatctattttctttgtacctcaattaaacatagtaagttgtacatttcctctagtccatttcagccttaagaaaatcttacctattaatctccaaaggacatggatgatttattcttctcatacactatttaggtgtgatccatttctgttttttgtgtaatggttaaatttgtgtacagagtaatagagttcaccatttgtatccatgatgtacaacactcggattttatctcgagcagaaagaaagctaggtgtatggagcacagaggctgtcacccctgcaatatgtctgatcctatagctgaggaatatgcagccaaattttatagcttacaagatgcccaaactgacttccccatagatttcactgcacatttctcagctccctgcaagaacttctcagttaagtcccatccatttgggaatgccttccctggctagtaatttccaagtccgctcatgctgctcagatctcctagtcacccatttgatgaatcacttgacccctccaattagtcttcattttattaattttaatatatatacttatgtcatttccccttccttttcctctttctaaccactcccatgtccctaccttactctgtcaaatttatggtagccttattttaatatatataatattatatataattaatatattattgcatatatgttatatatatgtgatatagtgtgtatgtatatatatatatatattgcatatataaaatccaaacatacggcaagcatttgtcaagtatgtctttaacccattaagaagagaacaagtaacatggtaaacaaaattcaacaagggaggatgagagggcgagggaatgaggggatggatatgtaaatatgggtgcctctaaaataaaaaaaaaattaaaaaggcaattcaaagtgcatttgagaaaatatataagtaccacaggaaaatgttaaaagaaaacatctagaagagaagatgtttagctataaatctaatgtacaaactatatcttcgggatttgctcatgctggtgcatagaaataactgatatctctacatgacaagaatgtacaagtaaacgtggaattccatagactcttaaccttctgcatttgttccaggtttctcttacaggctgtatggttgtgggttattttggtttggtttggtttggtttggttagattttttatctattcattgtactatcatccctagaagtatagttccctcgcaccaaagttccaggtttcttttcattatgcatttagggcccatattacggaaaagtctttaaaccttctcaaacaagtcttacatatcttcttccagggaagactagagtaatgaaggagtgtctgcccaggctgccaaacaactctcctttttacggacactcttcctgccagcctggtcccacagccatgtcaatcccaaatgaacacacagacactatattaattatgaaactgttggtcactggctagggcttcttattgtctagctctgtcttaattaataacccatttctatcaatctatgtattgccatgaggctgtgacttacccagtaatgcccagcatggtattactcctctggcagcctatatggtgactggctctgcctatgtttcccagaatcctcctcatctcccagtcccacctatcttactgccctattggccaacagtgttttattcatcaaccaataagataaacatatacagaagaccattccccatcatctcctatagcctctttatccctattgagggaggtggtgaggagcgattgttactggcttcagaacagctttcattattttactttgccctcatagcatcttgctttaggatgtgagaatatgcactacctacggcattgttctcatcattaagaagtgtgttttcagcatcttatatgctcgatgttaggaccactgagctgctgtgggtgaatgtgtcttcattctgtgctctatgaacaccagttgtctcggacaagttcccctcccgttcagcaagtctatggtattcaataagtgttccctgcatgttcatatcttaaattttactttctttattcgaattacctcccaagtataaaaggtctacatacaagtgttacagtgtcttcagagattccattgtcagaggccccaatagtgagttctacatacccacccacccccaccttgtgcttctgtcacaagagacataggcgtaatggctgggagcatgcagtttgtggtcagacagaattgaatcggaaacggcaatgcaaattatcacttgggaactggggcatattactcaactgttggagattttagtttccttatacctaaaataagataatagaaacttctttccagactgttatgtgactaagtgataatgtgcttaaaatgctttgttcacacactctgtaactgatagctatcctcttatgaccctgaattcccttgttctcttatacttttctcttgtttcttctgattcagcagcaagttcaagcactcagtgggggctcttagaacatgtcccctgtacatagggaaaacgatcgtaattattatatgctccattcataagaattctccctgtctaataaacataccccatttcacttttgcatgttcccaaaattatttgcagttctccattgtaactattgtctcatagagtatcataagttgcttttaaatcgaggcctttttaggaaaaactggtagaaaatatacacaaacgtgtgtgtgtgctcgaacatttagaaggattaaatgtcctctcattctacaatgtactattcactttcatcctaatagctttgttttcatgtatcctatatccttacagcccaccagttgttaagtttttgtgttattaactggttctatatagttactttgtattttgagggtatatattttctattttactatagtcatacttatttgtaagtaactatagtatgtctaactattgaatgtagatgtgaatagttacctaggtttagaaactgtcaccaaatattttccaaattagtaatgactcataggcaataccttgtcaataactgatttcttcaaagctctcattttattttcaagatgcacttaataattgttttctagaaatgttaattctatgtgtatgggtgtgtggcctgcacatatatgtgggtaccacatgtgtgcctggtgcctgcagaggtcagaagaatgtgtcagatcccctggaactgaagttaaggttgtttgtgagccaccatgggagtgttctgaacaaaactcatgtctttgctggattcttcaatagacttaaaatagccatcagtttatgtatttttgaaagactaaatgaacagggatagaaatgttaactggatattcaaaataaaacgaaagaactcaactgactaaaatgttctcaattggactggagaaatagctcggtggttatggacatttgctatctgtagagacaacccaggtttggttcccagcatccatgtggtggctcataaccatccataactccagctccaggggatccaataccctcttctggcctctgcagccactgttcacacatggtgcacacacatacatgaaggtaaatacacttatacacacaaaataaaactcagtcaatgtttaaaaagtgtctccctactaactgataaaggaaaatagtaaatatagatataagactccttcataaacaggttccctgtattcttgcctactctacttgttaccttgtttcctttcattttcattcatcatttatggcaaaatttcatcacacaattatttcatatatcatttccatcagcattccaattattttcttaggaaaaaatttatgggaaaaatcgtcatcattgttatttattaaatccccatagcacttttggagctcagatgttcatttaaatattttacatataattgcatatgtctctcattatctgataatattgacagttttataatgccccccccttaaaagataaggaagcaaggtttggcagttatgcaactatttccaggtttcagagtgtgctaataaatgaagagatggaggtaatgcaagaggcagctgttggtgaagataagaagaaacaaaaggagaaaactaagaaagttcaacattatatacaaagaccaaggatctaacgtcctcttccaacttcatggatccacagtcatgtaaacccacactcctgtgcaaaacacacacacacacacacacacacacacacacacacacacacacagaagtaaaatgtaaccatttttgattctgtggttctatttcatttatcaattgatcaatgtatttactcacttgccaaaatctatctggttagctactatgctgaaactaaagagaaagtcttcattatcagaaagaattaaataatagtcaggctggaaaaatggctcagtgattaagatcactgactactcttccataggacctgggttcaattcccacatggcagctcataactgtctgtaattccaattccaggggacctgacactcaggcaaaatatcaatgcacattttttaaaaggttaagattataggtagaataataatataagaaggaaaatttaagaaaaacattgttttttacaatgtctaagtaattctcatataatttaaatagcaaattgatagctattaacattgtaaatacaatatgccattgtatgtgtataatataagcataggtacagagaaagagaaattttgcatagcaatttattctacttagtcaatatctactagaaacaagtagtaagaaaacaaatggatgtttcatttcctcttaccaaagcctttttaaaaacagtattaaatatttatggtttcatttttataaacattttatgtgtgaagttagagtaaaagtttcctactccctggagtcaatttgtgctcaagtagaaacaatgacatcatagtgggcaatgtgtttcacattgttcctcgctaagaagtggtcagttttagtcgtttgtatttacaaggtaaaaccacagaggagctgccttggtctgcaaccctacagtgtaaaactgtaaatactgaaaaccaaaatgtgtctgactttctgagagctttctttgagccactgtgttgctactaacttatctgtatcatcaccacccaactgagagttagaatcaaagtcaaaacccacagaatgatctaaaagcaagacaaactctgcaagtgggttttcctttatgcttctccaaaccgggtttccatgtccatttgaactgatatcgggagaagacatcttgttcacacttggatcgttataggactttatctgctctttctccatttagtatactttgtagaaggccacaggtttatagcgttgaatcatcttacatatcacagaccttatcaaatactctttgccatctccaggacaaaactcacattatttgggaaggtatttctaattccctccctatagttgttgcttcaccttgctcatgacaccaaaccatcatgttgcaatattaaataacatttgatacaagttaacacattcttacaacacaatagtaaacatacaaagtggaaaaattaaagaacagctaaaactgggttttacaggatgaccataattgatagtttactggtagggcactcacctgtttttttttttttattacaagcagcatgccaaaagaaataagcaaatattaatataaccaaggtttcagttatctctaatgcttattgggaacactggctttgggaaagccattgaaaactctagacatcactgcttccagaactatagtgggaaacagaaattgtaatacatctgcatagaggaattgcattatatcgccttggatatcctgctaagaagttttactcattgacgttattgttctgcttaaaatagattacattaaagtatcttccatttctaacactgaaatccattggcaactttcatcactatgtttctgagagtagattagcagaatatcacatcatcgtgtagatgaactaagtgaatttacaagagaatactttgcctgatgtttccctttattgagcccatttcctccatcattttttttggttattataagattagaacttcatggctttaaataatactgacaaccatgtgctataattattactaggtataattacaatatctgtgtcaaattctataaaatgtttataggagactttccttatatcatgattctaaaccaaatttaaatacattaaaacataagtttcagatatatcatttactaataaatatgctaaacttaagagcttttctttaaaacttcagatcttgcataaagtgtatactgtcagatgtttttcttcttattcctttaaggtattttttattaaatttgcatagatatttgtggttggtgcataccatggcacatgtgtagaggtcagaggacaacttgcagtagctggttctctactttcgccatgtggattctgggcattgaatttgggtcatcagcttcaccttagcatcttcacccactgagctacaccattggtcctctctttgaaacaagctaaaaggctgacaaacttttgtaaagtttcagttgcttctgcatgcttaattattaaagaacttgagtttatcagtgtggtgttgtagtattgcctaactttcaccaacatacattatcttaatagctacttgttagtttacaggcatgccctagctataaagtaatcaatactggaaatctcaagaatcgcttcaattgtatcatgatttataaagttaataaaagcgtctagaagctttgtaaccaagatgtcccattcactctcagaattatatcatctgcctattttgcctatataatcagcctgtttctgtcagtctgcttattacagctgtgctggcacccactctgaccaccatgcccagaacagctgcatgccattctgcgtgtataacaaaaacagctagcataaacacattgaccttcagatgacacctaatgtaggcggtttgtatacataatcatggccacagactgcctggcttggtcaaagccatgaaacaagtgtgggtttggttacaacttagagtccttcagtgtctagtttggggttaccttaacaccaacttgaactactttgggttttctccagtaagcacagtggatatcgtctcaattttatagaatgtgttatttatgaaaaagtggcatcaatctaaagtcattgcctttttatcaaaaaaaatcctttttttgtccaggatattctgatagaggttacccctaagatcactctctttaacaattttgctttacaaatgggatgtgtgcatacatttaagaaagacacggtggcatgtcttccttgagtatcaattttactctattatttagtagacagtatgccaagaataacctgtattaaaatgtttgaaaagcgtgtgatatccatacacagtttaaaaacatgagccttcagaaaggtaactcttcattagtcattctcccttcgctccactgcactccgtctttcctccctcaaaagccagttccctttaaatacaggtacccaaagatccaaagctgacacccacatgtaacagaatgtgtgacatttgtcttcctgggcctgtattacctcaataagaatgattattttcaaccccattcatggacctgcagatttcacaattttatttgacttcaacagccagataacattacactgtataaatgtaccacatgttcattacccacttatcatttgataggcatgcaggttgatcttacttcctggctattgtgagcatagcagcagtagatatggataagcaagtatttctatgacagtatatagtcttctgtgcataggccaaggagggtctagctatgtatatggtacatcatttctagcttttgaagaaccatcacagtgatttctatagtggctgccccaatttgtactcccaccgacagtgaataaacgttcccttcccccacacatgtgccagcatttgttgtcatttagtttttcttattctcagccattctggctgaaataagatgaaatttcaaaattgttttgatttgtacttccctggtggctactaaggatgctgaagatttttaaaaattacttctcagccatttgtatttctttcaataactctggatagtaccatatcccagtttttagggttttttattctttatatattttagatactaaccctctgtcagatatacagctgacaaagatttttttccccatccagtgggcttcctcttgaatgatggtatcttttgctgtacagaagcttttttagtctcatgagctccattcatcaattgtttgtcgtaatggctgtgctactgggatctgttcagaaagtcctttcctgtccctctaagtcccaactctctcttctataagagtcaggataccagcttttatgtcaaggtcctcgttctatttggagttgacatttttagacttattccaatattttttatctttttgagactattataaataaacgtattgctatgacttctttttcagtatgtttatcattggtatgcttatcattggcactttgctgagtacatttatcagttgcaaaagttgtttggtggacttgtaaggccttttatgtataaaatcatatcatgtgcaaataaggatactttgacttcttcctttactacttctatctgtcttattgatctagctaatatttcatgaactataaagaacaagggtggagtacgtgagcatacttctcttgttcttgattacagtggaaattctttgaactttttccccatttagcatgacattggctgtggacttgctatatattgcctttattgtattgagatatatagtctgtagccctagattctccaagattttttatcatgaaatcatgtcatgtttgtcaatggtattttctatatatgaagggatgatcgtgtagtttctgtccttgaatgtatttatgtggtggattatatttattgatttatgtttattgaaatatcagatcagaagaagaagcttggggagagataacactaaaggccttttctatatctaatgagatgatcatatagtttctgtccttggatatatttatgtgatgggttatatttattgattcatatatgttgaaatatcaaacatgaagtattatggagagataactaatgctaaagacaatggagaattcatgtgtaaatctggtactacagaagctttttaaaatatacacataatataaagaatataaatgcagttactctataaggaggggcattgcctctccaagaaaccaatgtgttaccttttttagagttattggtcggtggaatcacatctacccccaaaaactacaggctgttgtcatttctcttggctaccctccagaaattgacagcaataccctattgctaaagataccacactcttgagtcatgggacacagaggaataaaactaacattaacctggaaatgccattcctactggctgtctttcatagttctggatggcagtaattcatgccttccaggggagaaaagtattcatcaatattacccagctgtgaattctgaaagctacaataatgactggcctggtagactatgcacactggttcaatggtggcacgaatgttatggaagtaaccaaccactttctgattggatctagggcccactccagaagctaggattaattctggggccaagaacctgtaactatataaatcatagatgttgggagccatacagcttggcatgaacctttaggtcaaacttggcaagccacatggttatagaactgtcttttgattataaatggcttctagaagcatgagcacccagaaggaacaacatgacccagacgtcaatcctttgttccaaccacaaacccacttacctaagcaaccttccttcttcccaccactcacctaggtaaccctccctctccccaccacccatgaactttttaccctgccaacatctgtttaaactaacacctggctcttggcctcttctccccctcccttttaccccatactactgactatataatctagcctggaaaaaataaaatctgccacttgatcagaatactgtcttgtggtcattctctcgaatctcttgtctccattcccctccctggacttcttgctgtaggttgctgtcctgtgggtcgggacaactacacataggcactagggtataatctactagtattattcttctaaatgaacatattattaaactgaatcctgaggacttaccattatactcatggactaatacatcttgcaacactaattggagaagcttccttttgcaatagacagttattagcacagaaacctacaatattcaatgttcaaaaaataagaaactgcaatgtactcatccttaagtgagacatctatgtcatgccctaccctctcaaggatcaggatttactgaggaaaaaaaggggcaaaaactttgtaagagccagaagcagtagataactatagtaaacagtgtttttggattaaatgggggagaaacttaaagcaattccactaaaatcagagacatggttgtctgctctctccatatttattcaatatagtacctgaagttttagcgaaagcaataaggcaactaaaggagatcaaggggatacaaactggaaaggaagaagtcaaagcatcactatttgcagatgatatgatagtatacataaacaaccacaaagattctatcagtgtactcctaaacaccttcagcaaagtggctggatactcagtggttagggacactggctgctctttcaatggtcctgagttcaattccaggcaacctcactgaggctcacaaaataaactttaaaaaaatcagtagcccacctatatacaaacaataaatgtgctgaaaaagaaattagggaaataacacccttcataataaacacaaataatataaaatatcttggtgtaattctaaccaaacaagtgaaagatctttttggcaagaacctcaagtcttttttttttttttttttttttttttttttttttggttttttgagacagggtttctctgtggctttgcagcctgtcctggaactcactctggagaccaggctggtctcgaactcacggagatccaccttcctctgcctcccgagtgctggaattaaaggcgtgcaccaccaccgcccagcgagaacctcaagtcttaaacaaagaaattgaagaagatatcagaagatagaaaggtctcccatgctcatggattggtaggattagcatagtaaaaatggtcaccctaccaaaagcaatctacagattcccatcaaaactttaacacaattcttttcatatagaaaagcaaagagcccaagataggtaaaaaacaatcctgtataataaaagaacttccctgtataataaaagaacttctagaggtatcaccatccctgatttcaaactgtactacagagcaatagtaataaaataccgcatgcttttgtcaaaaaaaatagacaggttgaccaatgcaactgaattgaaggaccagacattaatccacgtacctatgagcacccaagttttttttttttatatataaagaagccagaaaaatatggtggaaaaaagatagcatcttcaacaaatggtgctggtataacttcataccaagccgggcgttggtggtggcaaccaaactttaatcccagcacttgggaggcagaggcaggcagatctctgtgagttcaaggccagtctggtctacaaagcaagttccaggacaacatgcaaagcaatacagagaaaccctgtcttgaaaaacaaaacaaaaaaccaacttgcatgccagtatgtaagaagaatgtaaatatatacatatctatcaccctgtacaaagtccaagtggatcaaagacctcaacataaatccagatacactgaacctgatttaaaaaaaaaaaaagtgggtatagccttgcacgcattggtacagagacaacttcctgaacaaaacaccaatcatgcagacactaagattaacaattaataaagaggacctcatgaaactgaaaagcatttgtaaggcaaagtacattgtcaaaaaaacaaaacagctacagaatggaaaaggatcttcaccaaccccacatctgacagagggctgatttccaaactatataaagaattcaaactagatatcaaaaaaatcaaatgatcccatttttaaaatgtggtacaaatctaaagaatcccaacaaggaaatctcaattggctgagaagcacttaaagaaatgatcagcatccttagccatcagggaaatgcaaatcaaaacaactctgagactccatcttaacacctgtcagaatggctaagatcaaaaacacaagtgacagctcagactggtgagaatatggatcaagggggacactcctccattgctggtgtgagtgcaacttgtacagccactttggaaatcaatattgttgtttctcagaaaattggaaatcgacctacctcaggagccagatacaccattcctgggcatatacccaaagggtgctttacatatcagaaggacatctgcttaactatgttcatagtagctttattcataatagaaactggaaacaatctacatgttcatcaaccaaagaatggataaagaaaatgtggtgcatttacacaatggagtattgctcaggatggaactagaaaagaccatcgtgagtgaggcaacccagaactagaaagataaacaagttagatgctcacttataggtgtatattagtcacaaattaaaggataaccattctacaatccacagacccatataagctaaataagggaaggagcacatgaatctcactgtgaagggggaaaagaatagccatcatagtgaggaggttctgaatgggggtggacatgggaataagagggttcagattggagcaggatggaaggagagcgtgctggcaaagtcaactggaatcaggggcatctctggaatgagctagacacctagatcaatggaaacttccaggaatctatgagggtgaccctagctaagacttctagcaatgggggatatcaagtatgaactggcccataaccaggaaataatacttccagtggagggaatgggaccccaacctatgcgtataacatttaacctataatttgtccttcctataagatatgctgaggtacaggtggtgccaaaattttaggagtgggcaatcaatgattggtctagcctgagacccatactatgagagggaacctatccctgacactgcctggaagactagaacccagaggctggacagtccagagacctaggatagaaccaaacatgactggcaaaaaaagtcaataaaatgattcctaatgatatgatattctactatagtcatagattgttgcatagcccaaatgccatcagagcagcttcacccagcaactcatgaaaacatatgcagagacccacagtcaaacaagcagacctcaggggatcctatggaagagaggaaggaaggattgtgggagccagaagggccaaggacaccacaagaaaattcacaaaatcaacttgcctgggtgtacagggactcacagacagaacaatcaaccagagagcttgccatgggactgacctaggccctctgcacctatgttacagttgtgtagcttggtcttcctgtaggactctggaggctgactccaactctgttgcctgcttttgggaccctttcctcctactgggttgccctccagccttaataggagaggagatgccaagcctcgctgtaacttgatatgacttggagggctgatatacatgggaggccttcccttttctgaagaaaaaggagtagtagatggggggatgagagagggaggcttggggagggactgggaagagaagagggagggagggagggagggaggggagactgatcaggctgtaaaattttaattggttaattataataaaactgttttttagaacacaacagggtagctgaacatatacactcagagtgtgcacaaggcttgcctaagatcaagccaaacaaaaacacaattgatggaacaccccacctctagctgaggagccattggcaattatggctgctgggaaaagagtcagtgttttgcaatgatgtgagcactgagaagctactcatgctctagcacagtggttctcaactttcctaatgctgagaccctttaatacagttcctcatgctgtgtgaccccccaaccacaaagctgtttttgttgctacttcataactgtacctttgctactgctatgaatcataatgtaaatatttttggagatagatgtttgttggtgaggtcactgtcaccaggctgagaaccactgctctagttgctgcccctatgcccatatacatactttgaagcactatggggacttaaaggggaaaaaaaggagaataaccccagtggcataatatataaccgcagtgcttaatggaattagtggggggagaaagaagaaatgaagttgagaaggaataattgatataaagggaatgaggtgaacttggtcaaaacatatgtatgcaaagcctttgcatcagctgagccaggggagggtagctcattcccctcattaaataaaattctttttgtgacagataaaaactattacacacccacaactggtcaaaaggcagaggataggtgactgtgggatgtccagcaccaattggtacatctacagtgcagccctacatctgagcctcagggaagatcacaggaaaggaggaaagatcagaagagccagaggaccaggatacctgtttcctggtggtgtcttctagacatgacagggaggcttcacccacaaaattgcaacaagacctgcatcatgacaccactaatcaacatgccgttgtggacaggaaaaccttgcaaggtcccacccctagatgaagagatataggcaaccaatggccctgagagaaggataatgctttccccaggggagggtctgggtgtgggtgtggtcatgtgtgcgtgggggggtatgagtgtgggtgtgtgcacggaggggaagagcatgagtagggagtacgtgtatttgtgtgtatttgtgtgtgtgtgtgtgtgtgtgtgtgtgtgtgtgtgtgtgtgtgtgtgtgtaaaacagtaataatcttaaaagaagaggtggtcagtttaagggagagtcaggaggacaaaggtggagatggaaggagaagaagtagtagtgaaaatggatgaaaatacagtgctcatgaatgagatccttgcaaaaaataaaatttaagttaaaaacccacattgcattcgggtatgaaactctcaaacaataaggatgttgaatctttacattagaaaattcacacatattgttacactatttaaaatatctaggaagtagaacaagtctatatactcaacaacaaatgaatgagtagagaaaatgtggtacaaacgcacaacagaatattttcagccattaaaaagtgaaatcgtgccagagggtggtgatgcacacccctttaatcccagtactcaggaggcagaggcaggcagatctctgtaagttcaaggtctacagagcaagttccaggacagccagggctacagagagaaaaactgtcttgaaaaacaaatttaaaaaaatgctgctccttatattagaaaaatatattgtttttcaatctttcagtaattaaaaagcacacaaatatatagctttactactatctatttcaaatcttagtttagtataatactaaaaagaaaaaattagcgaggcatggtgatgcacacacttcacacctttaatcacaacacttgagaggcagagacaggggcatctctgagttcgaggtcagcctgacctatagagagtgccaagacaaccagggctacacagagaaaccctgtcttaaattaaaaaaaaaaaaagcaaatcaaacaaacaaatcttactattaaatttctgccaagttttcaactatttgtagtatttattttctacctggtgtcatagtttgggctaattttcttaggcagagactgtgttatacccacacaaatataaaggtttcaaacagtcaagtttttgaaaattacacatcaaaaaatttaaaaaaagaaaattacacatcacaaactagaggcttatagcttgactattaagttttaaaggatagaatattttgaaaggcctggtttcctttcagaaagccaagcacactttgaaacctccaaatgtaactgtcacggtcgcctgtgtgtcgaggctggtttcctggatggaccactttctggggaatctcttggtgtgcttgaaagagcacgtttcatttcactcttgcctcacacaaggcatgtgcgatatttcccttggtcccgtaaccctaacaagtttacatttctgcaactctctgtctacccctcctctaatacgcatttgtgaagatgaactttagacaaactcactgttgttttccgagtaaaacaatttgaacataatgttcccacctacaagttaaccaaatcatttgataaaattggtggtactgaaattgaggatgtctaaaaacagcagcatctgtgtccttgggactctggggtgatataaatacaatggctgagagcatttttaaccacagaatgtctgccttttatacattcgtaaggttgttgagttgttcttttcatggtccttactaaaatgcttatgtcaagggaacacacaactgtctgcttattcttttttcaaaatgaatccatatttgtagccttctcgtaatgtctggttcaacttccagccaaaccagcaaatacagtctctcaggaatgacaccaattctatactgtttgttgacaatctgtctgataaagaatcataacccatatcatatatttgtgtgtgtgtgttgtatcatatgtgtgtatatgagcacacacaaacctcaggttgatttagccctctggaataatttctaatcagtctttataatctaaaaatgtagctccaaatttttgaaatgtcatgtctgatatgagatattgtacattatgtagagaatataatattttttcttttttattaaattttactgacttgtcacaaaaaaaaatctgatttttggttaaatcattactcacagtattgcctgtgtctggggaaacatgctagcctaattagtatgaaactgaggttctttcttgctgatggaacaatgaagtaaattgaatttaggtgacctatcacaatagcattagtgattcagaccactggctgacaagaccattaagactgacccaaaggaaaccatacccatttaaggagaaacaaggagacactttctgtagctttactgcagatctcttttccttaaacaaatcctgtgggaactggcaattccgtgccaaaacacaggattctttagtcaaaatattcaaaggagggagtttttacattcttttggtaatctaaggactcagtagaaaaaataatagcaggaacataaggacatagtcataagcaataaccaaagctatgaaaagaattcagaaaataatatatggataaaatgcaaagttagtgtacatggattcagccaagaatagttacaaataattagcctgagctacccagcttccctggctataggtgccaagttcaggaggtaaacagttctccaatttagcatgtgtggaaggctccaattctaataataaaacatcttttaaatttttttgtactgcttgaatgcctggcagggccagaagacagcatcggtgcccctgaaactggagccgcggaaggttgtatgccacatgatgagggtgctgggtgctcttaaccgctgagctatctctgccccctgcagaagctgcctgcattgctatggtatagatgagatcttagaaagtcatattatatgcatttgttagaagcacagggcctggaggtaactgattcaaggatagacactcctttctaatatttaatttactcaaatgtaagatacagtatttcactacttcactaaggagtgagaatcaaataagacaaaatagaaatgttttaatgtacataatgtttctttattaatgatgttttggtggtattaattatgcttataaccctagactttgatgttcttctctgtaacaaaaaaaaaaaaagaaagaaagaaagattagtattaacaagagccccattttgctggccttgctgctgatactgggttacttgacaacaattttctatgcttttaacaaatgtatttttcaggaaatgacctttttgtactgttttgactctcctatttttcaaaaagagaaatgttatggaagaaaatgtgcattaatgctttccttcatttgctacttgtggctctgggacgtctttttcttccttgtcctaccttccagtctgttgctttgctgtatctttgcgttttgctcttagcatgtgtcatttccaaagccattcctcagaaactttagttatgttttaatagatagtttcagatgggtggaacttgctagtctgcccctcattacgttgcttctgactttgactgagggaggaaacagccagcatgactagggcactggacagggctccctgaactcggagatcacgagcacctagtgcttctctaattacatgtctcattcctggccatttaacaacctcaccacagggagtgactccacatcctgacggaaggctcccttcattagcttcaactatacatcataaccttctagctttacaatatcccaagggccatccctcccagggctgtggcaataggacactcttcatatttgaacatggacacagataacaattaatgacctccaactataagctgaaaaaagtgaaaactaagggtttgattttggggggtgttgttcgtttgtttgtttttaaggagctgcttacccaaatagcagctaaaaatcaagaattttatttcatctctttcttgaaaggcttacagtaagactcctcaatgctactgaagttaagtaaaagaagaacctgaaaaagcacatgagctatggagacaacactgcgattcaaggtctcatacattgagatttgaaagaaaaacaatcggattggaattttgagacctggattcaagctttgtttccatacgcaatgctaataatcacactaaccatgttgtgtggtaaatcctcatgtgtcaggctctgcatgaggcactttcagttactgtagggagacactctagccctgccccaggtaaccaggataggtgtgcacacgcccgtgagggtggggtgaggggaagtctaaggtgaggtaggataggcttcttaagggaccacagacacatggacgctctcttctctccttctgctggccctggtcccggctccctcctccttgctttggcttgtgcttggctggtatatccgaataaagaaaaccttgccctattgactgctggttgatcactaacaagttacctccatttatatgaaagaaaaccttcacagagaacatcagaaagttggcaaggacactcaaagaaaggcacaactgaaatttgaactctttgttttcctggaatataaatactaggcttttcatgaatctattgcttcctttaggctctattgcctcatgatagcatattacttaaacatttaagaaagcagtgttcccacctttgaatgtccatggacacatcttagtgagcttctaatacactgaaatatttttatctcaatggaaagtaattttactgactgtttgttatgaatcacattcttgttactatcttaatcctgaaaatatgtcttcattcctaggtgaaaattctcaggcttagaaaggttaaataacaaggtccaatggcacacttgcattggtgagactcattttcatcatatttccatccatgacgctaagaaacatagatcatgtatgtatgttttctaaattatcttcctggacaagtgagaatataagattcatcttctcactgatcaaagttgtgtctggtactgttagacccccgaaaactcaagtatccggggtcttaggccaggttcgtggtcaccccaatcaccaggcggattcgagagcttgctgcaaactgcacgaggctttattgtaatttaacgaactaaccccatgttagctcgggtctttcacccacccaccatggcggatggctagaaaagacggctccaacgggctcccaaaagatcttatagggcagcgtaaggggaatgtctaggggtatgcacaggcttacgcacaggctcacgattggtgtgcttccaggcttgccctgtgttgattggtcaactggttgttatggcccataggccctcccagggtggttgctatgctctctatgtcattgtcatggcttgtccgtaaagcacacccagggtcgtaaagcatagtgccaccagctaacttctgattggttccttgtcacaagacaggcatctgacctctaagtgactaaggttccttgtcacgagacaggcatctgacctctacgtgaccaaggcaggtttatggcaagcacgtgttcggctgttatggctgccaaaaggaagctggttccttcagtacaaaataagcattcaacaggtatttattgagtgatgatcaattttagttcagtcattggtttatttgactaaatggcttttacatcatgaagaaaaccatgagggtatctaaacactggttcacaggataggagttaatggctaagccatatatcataaagttaccacttcaaacatctttctagttacaataaatccttgctttggggaaaactaaaacttacagttcacttatatcttgagcttcatattttgcggtgcagttaataatacggtcaatggagataacaaacaggagatgcttttatgaaaggccatcaaaaagatgaaaacccattccacattcaaaagaagactgccttaagatgtaatagttctatggagagaactagtatttccatattttccttacttcatttccaaatgtttgttatctaccattccattagtgaatattgaatgaataggtagatgaataaaaaatagagtaaactgaatgtcaaatctaattaaaactaattttggcttactttaaataaaagcctatcttgtaatttcattcagctgcctcagtaaatggcacatagactttaggtttgcataatgaggcctagattcagaaatcagtttaaaaagacttgaagtcaccttacagatagacctgcagacttctgttattttagcattgctcacatagcctgttatggaaccagtccatcatgaagaactagagattatcatgttaagcaaaacaagctagactcacaagaacaaatatctctcatgtatggaacttaggaggaggggaacatgaaaaaaacagggtgaggaaaaggtgagagggagtaagaaaaggcactagagggcaaaagatgatcaaagcatgttacatgcatgcataaagtgtcataaggaatccaattacttataaaaacatagatttgtttcccatcatctttgtatgctcactgcaaggcattttgcccacaagaaagtatcaaaatacttgatttgttttataaaattcaaaaatttctttacagtggcatgtgtatttatttaggtctccatataaaactcagtgaaataatccatccttctccaagtccttgtgctgttctagagtagtattatctctacctggatttctgcagaagttcctcatgggtctctctgcttctgcttattgccagaaaagttcttttcattgtgatttgacttatgttggctctcttgtctaatggggaaagatttcacacaggtctgacaacttctcagaataccttttgggagaaatgggatcgaagataacactgaagcagtgatgagtgggaccacaaaccttgacaaggacagcttagagatgcattcctcttgccctctatttaaacctaaaccttatttgaggacctcaaagactgtatgtggtacaggaacttaacccattcttgttgttccttagaacaagaccatcccttactcataaattgatggcttatatgcagcacttaaattttgttaagatttttccacctctgtggatgttattatgactgtttttatgtaatactgcagtctgcttctcggcttcttgtgtctgctcctccattcttttagttccttaattaccactacctatttctattctttcccataccactattgtagcaagtgagtagagtggagaaggacgtcaaaattggcatacgaagggtcaggtgtgggaggcacatgcctttaatgtcagcactccagaagcagagacaagttaattgatctctttgagttcaaggccagcctggtatacacagagagttccaggctaaccagggttacacagtgagaccccatctcaatcgccccctgccccaaaaacaaaatgcctatgaaagaaaccagttggcagaagggaaaattggaactgccaccaattctgagatgcaacaggatgtagacatgggaaaatgtgtgctgtgcaggtggcatgggaaagttccaatcctggggcatggtgtcatcaagcataccttccatccatccctcacctattcattctcttggttctggtgatggtggcttatgccttgaatccaagaactcaggaggggaggcaggcagatctctgtgagtttgaagctctacatggtgagctccgtttcagcaaggatacatagtgaaactgtctccaaaaaaaaataaaataaaataaagaggaaaaacagcatgtaaaaatggtaaagttcaaccaacattttccctttagaatagtgactagtgactcttacagtatgcttactgcggggagcgaggaagatttccaggggttccaggaaccaggagctctgtctgcattgatgctaactgatttgctattgaatgacatggcctcactggggaatgcctcctagtttgcatctctacagaactaagcatttgaataggcctgcacctgggcggaggggctaggtgtgtaagtaacttgtgaggacatagagttaggagccttctagcagagaggagtcaagagaaggactgaaatggcctcctcgtggccatggaacatggttaaggaacagcccagaagatgctaaataaacaagagactctagttttacaacatggaactgagagctcgctagagatgacaagatgcctgtgtttggtctttatcgctgttgggttactaggagctttcaagtccacgttcccccactcaagccgaatctcatggctgctgtggtttagggttgagacggcccaggccacaacagcttacttgaaaaaggatgacgaatatttatcttattttgtttttttcttttgaggcaaagcaatgtagtcttgactggtcttgaactctctttgtagacaaggctgacattgaactcacagagatctacctgactctgcctccagagtgctgggattaaaggcacaagccaccatgcctgtctgtctaaaacaggcaagcttttggtaggtggttttttcgttgtttgcttgtttttcagtcgcaaaacattgggaaaaatattttatattgctataatactggaagtttacattgttagggtattatctgttttactataacaataaagatactacaacaatctcctactttaattaagtcagcagaaaattgttaatgtaaatttatcaaaatattaatatagaatcatcaaatctaaggtgatttttcaaagtctgttttattattttgtgtacgagtgttttggctgaatgtgtctatgtgcaccacatgcatgcagtgccagaggagaccagaagaaagcacaggattccgtgggactgaagttacagagctgtgagcccccatgtggatgctaggaactgaaaccaggtccttgggaagagcagccggtgctcttaaccaatgagccatctctccagccccacaagatgagttttctgtgacatgtaaataaaggcaaatcattgagtagataagaatgacaaggactgactttactttttcaaccctttaacttcaatgcaatttgttttgcacagttttcaagtgattaaaaatatccaagatatacatgttaagtcactaattctgttaattctcacttattgcaacacaataatagatcaattttaactataaatattattaatgagttcagtactgacatattaggtagcaacccaagagacaagatcagaactttgtaattattattttgatggggtatgtccttctgtatgctgtgaatatgtttcttttattggttgatgaataaagctatttcagtcaaaggacaggcaggatgtggctggtaagaagtataggctactagactaggagaattctgggaagaggaacacagtgagtctcgagggagatgccaagtagttggcaaggaagaaacagactagggcatcactagtaaaccaagaccacatacagatacacagattaatatacatgggttaataattaagagagagctagccaataagaagcctgagcaataggtcaaacagtttataattaatataagcctctatgtgtttatttgggactaaatgactgcagaacagggtggggcagaaacttctgtctacatgtggtgtatataagtctctgggtcttttatttgtcatgttacattatttttttaattcaggcttcaggacacgggttcaatgctgactttgtaggttactggccttgtaacttggagaattcctgttttcctctactctcgggtttttcactaacaaattggaaaatatttaatttgtaaaacgactatcactatctgcagacatctcttgacttgacagcagaggacaattctacaacattgaaatccctggttctaggtggtctgggttctagcgtttcacagtctttctgagtttggtcctatctttcttcagacttcacaggcagacaaacttgatctgtctcagccaattagttacctgatgagattacacatgtaaaatggcctgaaaatagtcctctaaccaacaattttaaaacatgggattgaaaattgatcagtgtggcgccccttgagcagccacactgtgttaatgttaattaacacagccacctgtgttaatgtctgtggcacctgtcatctctagatctgtacaggggtctgtagtagggtcacgttggtgtcctagggctgtgcagccatgagggccatagcaatctatatggcaccaatctatatggcactgtggcaccagaggccatggtgaaaaccatggtcttgctgcagccagggtccacatggatgcccagggtctgggctgcgacctgtgaccatgttggtgcccaagggctatgccactgctagtgacaggccaatttgggtagctagtgttatcaactggggtcatagtatcacccagaccagggctgaagccatgggccatggctgggtccttgatcctgtcacatccagatccagatctgtgttgatgtctgtggctcctgagaccattgaagactgtgttgatgccaggggcctaggctgccacctggggccaggttggtatctgaggaccatgctgacatggaggccatgctggtccagatggcctgaagtgccacctggaaccatggtgacatccaggcccaggatgcttcctaggactatgactgggtctgtggtcctaccatagccagggtctgtattaatgtccatgacccatgttgccaccaaaggccacatagatgcccagggtctgggtcacaacctgtggctacgaaggtatgtgagggccatgctgccaccagggacatcctgatctgaatgtttgatctgaatgtcctgcaatgtcactgggggccatggtgttgtccaggccagggctgctgcagaggattatgtctgagttcatagtcctacagcagacagggtctgagttgatgtccagagcacctgttatcactgagggctgtgcagagaaccaggctctgggaccatgtcagtgtcaaagaaccatgccacgcctggggccatgctgatctgggtggccaatgctgccacctggagccatggagacttctaggaacacaggcctctgcctagggccatgtctgggtccatggccctgtgaacacatgaatctgtggtggtgtccatggctccaattgctaccgagtgtaacaataaatctttgctccaaggccaccccagccatgtcaacacatgggtgctttctgccaggctgcctgagttctgcccgccaccacgttaaggtgccaagcaacacacagagacttatattaggtacaaatgcttcttggccaaagactaggatttcttatatgctagctcagtcttagttatcaaccataaccataatctatatattttataagacttatctaatggaggatgccttctgctggcgtcctcatcctgggatcacatggcagctcagagcagagcaggagcaagagcaaaaaggagccgacttccttcttgcctttgcttatatactgagtctgcctgctatgtcacttcttgcccatatcttttactacatttcccagaatcctccttgattcctagtcccacctgacttgctgcctcattggccaaacagtactttatttatcatccaataagacaaacacatacacagaagcacttcccccgtcaattgagggctctgcagatgctcgggatatggccagatacctgggaccatgttgatgccctggggccatgctgttggtgggaccatgcccatctgaggggcctgtcctgccaccagggtcacggtggcatctgatcccgagcttctgccaagggctatatctgggtctctgatcctgctgctgctggggtctgtggtgatgtccagggccattggaacaaggctgtgctgagccagctccacccttcactggccctgggatggttggtcctgggccttcctggatattgcagcagaggagctggccctacccagaggagagctcactccctgcccttgggaaggataaccccatcccttaccatagatgcatctcccctggaaaatccctagaactgaccctgtggtcaggaacacaggggagccatccctgagggcatgagggcaggagagctgaccctaccccacccttcatctactgtgtggtggcatgggtgagggaaagatgccctcttcccccatctattaccacctgcagcaggaatttttatttctatgatcttgggatttgttgtgaaccacactttaagtacatagtacgttgagataaaacaaaacatttctctatgatgaaagaggtggtctgatactaagtgcaactccagagtcatgagaatcagttacactgtgcaccttttcctacattgaataacaaacatgataacaatggttaaaacatgaaaaaaataacaatttggtattagataatcttaaggaattattttattttaattttttaaagtagtggtagtattttgccttttttttttttttaagacaaggcctaatgtatcccaagctggcttgaactggctatgtagccaaggaagactttgaacgtctgctccccactcacctccacctcccaagtgctggaattctaggactatgccactttgtgcctagtaaatgtgttattggggattggacccagggcttcctgcacactagacaagcactgcgccatctgaactacattcccaccccttcagttgtcatgtttaaggtaaaagttacgtcagatatggtggttcgtgtctgtaatgtagcatgtggaaggcttaagcaggatctgggttaaagagtgacagattgtctcaagggaccaaaagaagaagaaaagagagagaaggaagaggagatggaaattgaaagacgttattgttctgaaatatgcagcatggtaggattcataaaatacaaactatgtttaaaaatcactcagattgggcagagaagacagggtaatggggtgtctgtaagagttattgaatttgtcatgttattttcttgacattatgttaaatttttttccacactaaaacatgacctgcaatattgcgtgacttattttcagcaattacagtttgtcccatgtctccctaaattttccaacattatttttcctctgcgtaaaaggacaacttgtcattattttggaaagactatagcattcatgcttccaatggtgattgagttaacaggaatgctgcactaattacttaagtttcaaaccttatttcccttgaaaagcagcagttggaagtacctcacaaaaatgattttactaaattacacttcttgctacacagtgagcctcttgagatggatttcctagtaacttgtgcaataattcagtagaagatcgccctctgctgtcttaatgaaaactgaccacacaagtggggcacaatcgattgattgctcgatatttttccagtatgattaattcaaataataatttgcagtcaagatgtgagagcatagctatcaatgttgtagggattaagaaatatatattaaatatatatataagcataaagaatatatataagcataaagaatatatatgttctatatatattctatattctttatagtttgtttgattctttattccagttgtaagacaggctctaaaatacagaaaaaaatgtttaatttgaagaaagaatttggtaagtgttgtttttaaaactgtgtgataaggcacttgaatttttgttctaatttttggggatggtttgtttgtttgtttgtgtttgtttctgttgttttgttggctttttgccaattttctacttaaactcttaggcaagaggtcaaaacatgtttatagatgtctgttggatccttttcgcctgacagagataaaataatttcattaattaaaaagaactaccactgctgacagcattataggggatgcctatgagctatatcaataaatttacaaatttggatttcttggaaaataaaatgtattaaaaatgatacaaaataaagttttagaaaaaatgaacagaactctatcatcatcatcatcatcatcatcatcattctgttgacattgggagttgaacttagagcctctcccattaggtgagttttctacagtatctccagtattcaagaatagagtttccataaacaaaatcaggaccttttaggaagggtggatggaatcatgtttaagcacacacaggaaaggcaacacaatatgttcaacacccccctccctagctagagtcagctctaaattctttcagttcctcaccagttctccacaatggttaaggtgcccactttctaatgatgcccagctcagactaaaacttcactatcttgaatcctcaaaactagaatgcataagtgtaaattccacacatatacctttcaacaaaatgctactaactaggcctatgactctccccacccccactctgtaggtctccttttatacaaagatttccccaaaatgaactttgctttgctacaggtggattgtggttacagatctttaataaactcatttcttccgtctttattttccatactatatgtctggagaaacgccagcatggtgttagagacctttatgtgattatatatggtttgtccacaagttcataatactatctaagttctgatcctatgatgggggaggtccttctgtgtatatgattgccttattggttgataaataaagtactgatggccaacagggaaacaagataggtgggactaggagtcaaggaggattctgggaaaggtaggagaacgggtagagtcaccatgtgcgcccaggaagacaggacacttgttgctggcatccgataagtcttataaaatatatagatttatgataattaaaactgagctagcagatgagaaatcctagtcattgatcaagcagcatttgtacctaacataagtctcgtgtgttacttgggaccctaacatggtggcaggcagaatttgggcagtctggcagagagcacccatgaggcagcagggctcagaaagacttatcgttacaatcctaagtcaaaatctcttaagtctccagccacctgttcaaagtgacaagtcaggctgtggaaatcaatctgcctcaagacccggatatgccactcttgggtgtatacccaaaggaccctctatcatacaacaaggacacctgatcaaccatacttattactgctttattcacaatagccagaaactagaaaccagaaactggaaacaacctagatgtccctcaaccaaagaatgaataaagaaaatgtggtgcaatggagtgttgctcagcagttaaaaacaatggtatcatgaaatttgcaggcaagctgatgggttacctcatcctgagtgaggtaacccagacccagaaagacagacatcatatgcactcactcaaaagtggatattagctataaaataaagaataagcatcctacaatccacagtctcaagaaggctaagtcacaaggggggttcaaggagggtcgtcacatggatctccctgggaagggaaaatagaatagattttgctggcagactcagagtgggtggagatgagattagtagggattaggcagagggtaggagaaatggaggaagagagagcagaggagagattactggaaatggagagcatttggaggggtggggtgaaacagaaacctactgcagtggaaactccctggaatctatgagagtttccctagcaaagtcgtctagaagtagaggataaagagccagaaatggccatcttctataaagacaaggagtctagcagtggggctgggacatcaaccagccacaaaaccttcagcctaccatttgtcctgcctgcaagatgagttgaggcaatagtggcacagaacctgtgggagtggccaatccatgattggtccaacttgtgccctgtgccactacagggagcccatgcctgacactgccaggatggctaggaaccagaggcaggagagcccacagatccaggatagaaacaaacatgaagggggggggaataaaagctaataaaatgattcctaataatgttctgatatacttttggatcagtgcctaacccaattgtcatcagaggagcagtaactgatgggagcagattcagagacccaccgtcatacactagatggagccaggagaaccccacagaagagggagaagaggatcctgggagccagaggcgtccgggatagaggagatcagagatcacagaatcaactaagcaggggctcacagaaactgaattgacaaacacagagcctctatgggtcttagctagatcctctgcactttatggttgtgtagcttggtgttcctgtgggactcccaagagtgggagtgtggggtcactctggctcttttgcctgtgcttgggaccctttacctcctatttatggggtttcgacacccagccatgatatgaggatctgtacctggtcttattgcaacttgttaggccctgtctggtggatatatccctgggaggcctgctcatttgtttgtttgtttgcttgcttgtttgtttgttttgaaggggaaaaggaagagttgattgctggagaggggggggtggggggggagaagtgggagaccgtggtcaggatataatatatgagagaagaataaaagtcaaataagcagaaacaagccagcagtgctcacaaagaggctgtggcaatctaactggtcacaagactgattctgccgctaacggagtaaagaggaattctggtaagagtggtaggcagcactgagcaaggctgacagtgctggaagttctgacaatagctacaaaagtgaatgaccatgctcagaggtggtcggcagcaaccatttagcaggcactgcttgttgtatttgttaggagctcatcattgtagctgagagtttatatgaccatcattcaacactttagtaagtttcattactagaagtcggcatgttctgggaagatccctaaactcatgagacctaagttacagatgctggcatgacggagaattctgtgctcctagacctgacagtgggctgctcaccctggcctaaaggtcaggctgtggtgcactgagtgtttcaaggtgcctgcaatgcactcaggaaagcccatttctgctcttgatgacccagatcagggctccacaattcacatctggtggagaaagtgtggctctttctctaggagacccatagaatgggctcagagctttcacagtcctccttcttcatgacagggctgcaagttctgagctagcaatagcttctaaaatgaacgggatttccttatatggaaatcttatattaagattctatattattgacaagtgaggccatttgtggaaagaccaacttcatagtaaagatcagaactctagaagaccatctagttccagatagaaatgtcctgatctggacatcaggtctaccaactaggtactgattgatctattgactgctagcatctcactgaatcaatcatcttcattgtttcacagtcagcatccctatttctcaccctgtgccaatgttctctcagaatgagggagaacattaagccttgggtctagtaacagactcaaaatccaaacacaagaactcacatcctgaacctagagtctaagatttaatactttcctcactctaaaggacaaggctataatccatttttttccaccagaaaaattcccaaatcttagctgcattgcaagccctagaacctgagtctccaacaccagtgctagaatggaaacaatgaaccagtaaggaggagatattattagagggctccatcaaacttgcaaatcaccaagacatagttcagacacacaggctaatgttctgagactaaagtcaagtgtcacagaagcccacagcccaaagacaaagcaagcctcaagcaaatacagtgacccttaattggagaagaaactcacagaacttgagcttcctcttcttcagaaagccaaggtcactgctcaaggtcagttccagtaagtggaaccaaaacccagggccaggactgcagaatccagagctgtgaactggggagagcagtaacaggttcatagcaatttttctgcttccaggttttatttccccagtcactgagggtacaaatactgcccagagccagtgattgagagccctgaattttggaatccagacttaagcaacacatgtgtaggaggatgatagcctggagaaggttggcaaggatggacaacactggcatgattcttaatgcctgagacattccatgcctgcaggtctagttcatgtccttttatttatccccattacatctgttatcattgaatgccattgtggggtacaaaagtaaaaccttaggtattttgacaaaaaaaaaaaaaacataatcctgttttcagagacaagacaaggcatgccacatggatcaacaagacaagctttgttcatgtggatcaagaatacaaccatccaagctgggcgttggtggcacacgcctttaattccagcactcaggaggcagaggcaggcggatctctgtgagttcaaggccagcctggtctccagagccagtgccaggataggctccaaagctacacagagaaaccctgtctcaaaaaaacaagaagaagaagaagaagaagaagaagaagaagaagaagaagaagaagaagaagaagaagaagaagaagaagaagaagaagaagaagcatccttagcagagttatgtccaagattggtatcagagagactgggtataggcctgcccactgtatgatcatataacttggatctatactgtgtggcaatccaggagattacaagaattgtatagcaaagtatcctgggtagcagtaggagacaggacttctggcagtactaggtcttccttatttccatttcagaatgaagcatgttggtattgcattttgttgtatctagctgcatgctattgtcatgttatttgtctttctgtatacaaatatttcctttgacagtagtaaatattttacacaaaaccaagagaacgtcaagagtatgaaccaccacattatcatatactaccctactgctctccaaactcaagcaagaagtggacagagagtggaattcaaacatgattggagcttttcccagtcaatgttttaaaggaagagaatttcaaaagaatcaaaagttgaaaactagtcattatattgattcatcttgctacctaggagtgtaggcaagaagtgaggctatgagagcaatgagggacagtgaaaagatgataaactcaagggttacatggccccaggaagtctttaagccattagaatctggttccagcaccgagtgagctaagtactaatagaagaaaactactgcatgggtttctctatggaagaaagcccatcactgtgtgtcctttagaaatccagccaggtgaattctacacccaggtagtcatttagctactaatcaagaatgtggcacatccactcagtgtccaccagtacctgtctttattattattccaacattcagatggaaccccaaccttaaaggatgtttataaataggtttatattatatcataggttacttttcatttactttaggtttctgatctctttttttctggagtattgagaacacaggatttgaaaggatattgcatagacaacggttacaaaattcccttatcctactgctgaatttggttttgaattaactttctagttccatttgcctagattcctgataaaggtataatgtcagctgtgtcactgagagatattgactactgtaaaaatgacctctgacccagaggacagattgaagaaaaaaaaaaaaaaaaacatagttttggacttcccagagtgtggtgattctgtgacttgtatggcctttatagaagtctggaagctgcttataaagctgctgtcaattgtttcctatcggagatgaagagatttaactaacattgctttatagctactactataccaccagaattcttatgagagcaactgctatcatgtggactgtagttgggcattcctctactacaggacaattctcagtgttcagtcatccctagtgccagactgtctttatttctcttcctcttcctcttcctcctctgcttcctgcttatccccccttcctctttctccccttgctcctcctctgtttgttattggttgattggtttgtttgatttttgtttgttgagacagggtctcactgtgtgtctctggctattctagaactcattaagtagaccaagatggcttcaaactctcagagatctgcctgcttctgtctcttaaatgctgtgattagaagcctgtatacttcctttctctttttttccttttttcttttcttttttctttctttttttttcagaaagagctagagaacagagtggtcaagggcaaaaacgtatccatctatggatatataggtgagggtttatgtgtgttttctgtttgttttgtatgtctccttgggtgtttgctttaatatgtgctaatgtgtacagggtgctgctccaaaggccttccatactatttcccagcaagaacacctctatgactccactgtttgtgtcataagaacaaaacccctaaggacattggaatagaagggtctggttatgtggcatgaaacaggaaagaagccaacaaccatctatgcttattacctgcattcaggtaacatggctatgaatgcagaaaaatctataaacttctgtaattagaaattaatatattgagtttaataactacagaaattaaccatgtttatatagagaatggaaaatattaattacaaaaaatgtattacctttaaaaatctttttgttagattatgactccataagctaaaacattcaaaatataccagtaaaaatccttttatatggttatactatgctttcatatgtattggtatatccacaatataccaataaaaattttaaaacttagaatcctggttaaatgaagagataaactattaattggagacttagtaagttgttaaatctaaattgactgacagggttaatgccgtaataatgaaaacatcagatttttatggaaattggacagatagctctaaaacttattttgatatcttgtagatttagaaaacttaaagactcatatttccaggtgttataatttggcacaagaatcgaaagagcaacagcaaacatagaaagtctaaagtcaaatctgcacgcattcacctaatttacaaaaatgaaccattttaattttgaatggtttttccaataaatagtactttactacatggatgtgtattaggcacaggcagaaagattaatagtaacacttcagaaagaaacatagaaagtttcttaactttacaaagaactaaccttaaaagaaaatattaatgacggttcctcagaaaattgcaaatccatctacctcaagacagagctataccactcttgggcatacacccaaaggatattcaatcataccacaaggacacttgctcaactatgttcacagcagcattattcataatagacagaacctggaaacaacccagaagtccttcaacagaagaatggataaagaaaatgtggttaaaaaaataaaatgaggtatatttacacaatggagtattacacagctgttttaaaaaatgatgtcatgaaatttgcaggcaaatggaaggaactagaaaaaaatcatcctgagcaaagtaacacagacccagaaagacaaacatgttatgtactcactcatatgtggatgttagctgtaaaataaaggataactacgctgcaattgagagccccagagagtctgggtaacaaggaaggcccaaagaaggacacatggattttcctgggaaggggaaatagaagagatctcctggataaactggagtgagtagggatgggaacttgagggacagggttgggtggaggattatgggggaaagtaatgaaagagatgtcttttttaaatgttttattattattatttaataaaaaattaataaatgaggtttccttaaaaattaagataagaggagatatgggagggtttggaagacagaaactgtgtgattataatctcaaagataaaagaaaatgctatgttcttggtgctagggagcaccacgtgctcctccaggggaccagagctcatggcagctcacaagcatcagtaactccagttccaaggtaccctttaacctcttctggcctcaaccatcaccaggcagccatgtggtatacataaaatatatatgcaggcaaaacatccaaacacacaaacaaaagttattttattaaactcttatattcatcgaaagccaataatggaaaaagtaaaaagcctggaaaagtgcctatgatatacataagcagaagagatttgtattctgattgtaaaaaaaaatacctataagtcattatgaaaagtgcagattgattacaacaaaatacaaaagctttgaacagatcacaacaaatgtttaggttagcaattaccatgtggaatattttcatcatcataacacactagggaaatagaactaaaacaaaataccaacatccatttacacctacaagagtggccaaaatcaaaagaactgaagtacaacctcttccctgagatgtagaatgtgtacaattgtcatacattgttgatggaagtgtggttcctttaatggagtctagacacctattttccctaccaccaacaaccaaccacaaagttagagtacatatctaccaaaaggaggttcttgagggcttcttctttctttattatttgtaactatgtgtttatgtatggtaggtatgtgcacatgagcgcacatgcctgtagcatttggaagagggtgtcagaccctctgtagctggaggcacaggagcttgtgagctgtctgatagcagtgctgggaacttaactcgggtcttctgtgagagcaatacctgctcttaacagtagagccaactccccagccccaagagatatttttcttaatgatcaaaaatttaaagccattctattgtgtctattaacaagaaaaaggtaaagtatgatgttttaatataagagagtagtttacagcaatcagaagaataaactgctgcttatctacaacaacatgaatgaatgtcacatgttaatgaatgaactaaacataagatgtaaaacagtatatacagtatgattctgtctacatgaatttaataaacataaaactaatttgctggctgggtgttggtggcgcacgcctttaatcccagcactcgggaggcagaggcaggtggatctctgtgagttcgaggccagcctggtctccagagcgaataggctccaaaactacacagagaaaccctgtctcgaaaaacaaaaaaaaaaaaaaaaaaaaaacctaatttgttaccatgcagatcaaaatcatacttacctttgggaacagtatctagaagtattaaggggtttctagggtcagaaaagtgtctatgcctgtacctataggatgttattagataagtaaatgatagacagatagatagatagatagatagatagatagatagatagatagatagatacatacatacatacatacatacatacatacatacatacatagaagatagataataacatattgacagatgggatggatgaatggatggacagatatgtatgtgtgagagagaattcattaatctgagccttacattctatatagtttaatgtcccattaggaaagaaataaatctctgaaataaagctataagtagaccctttcaatacctgagactaggctgaggagctatggaaatagctagggtggtgtcactaccctggaagccttctacccaaagaaagaataggactcaacagagcacacgtttgtcataaatgaaaaggctaacttcatgtttatttttatacctcacaagaaaacactatcccaaaaagagtgttatggtttaattgggtaggtaatgtttaattgtttgtaatttaacatagtttatatttcagaacagattgtggacttatggagcacaatacagtatcaaggaggattgagaaacaaacactctcagtcagagaattcacagactgccaaaaaggagtctgagcaacggacatcattccacttgccatttgaccagatcaccacacaatcttcctcattgccagtgtcattaggctggccaacactccagttagtgtactgcactctgtttccactcaaatccaaaaatcgattttcagtcctctcatctgttatgcccaagtaggcgatgtctttagccaccttgtggatggccacgttttcctcagcattccggggagtggccacaaaggcatgtaattgggagcacagagccttgactccattaaagttcaacattttaccggtgctcacaaagtacttctttccaacttgttcacccatcgataagagcacccctagaatgtaaaaaggtgggagacaccaacttatcttgtagaccactcattgtgtaaaattcactttggatggtgtagactgcattttctctgatagtgtgtgccacaatgagtgtcttcgctcatgagacccctggtggactgcttacacaaaccaaaacgtgcctcttttacctaaaattcgagttgaactattatcttgcttcttttccttgcagtcttaatatgcataaacaggcacaaagcctttgtttgtgttagatctgcattgcagaacacatgtaatctgcaattctgaattctcccatgctgttaccttgcaatcaaacaacaacatctggaaatatctgaccatagctgggagaaacatgcttggctccattgtctggcttagatccaggattacaaagtggcccacatgtcatttttgtgatcaaagatctgaccctatgtaggactggttagtctaagagtcactgccacttatagactggttctaacactgagctctgtgaatctgagtaagtaatttaattcctatttgcctctctttctcccagatcattgttaggagagtaacgtgagttcagaatatgagcaatttttcaggtcctagaaaatcgtattcgtgcagtgaatattctctggctcctaccactcccaaactttaagttgcctaaataagaggggaagggtacttacacttcttaaagcctctcaactctgacctcagggctgatatttctgcatcaatttttctagaatcaaatcctagaaaatgaaacagtgaaaagtactgttaggatgatgatgcaaactgtgcatactaaggagtatggtatctttttcagataaaagaaaagaagcaaggtttgcttttatttttaacattgatgtactttagtggaaaaaaaatctgtttttacctggccaaaaacatcaatctttctgtgatactttatctaaaacaagcacttagtaactgcttttgcttaaaaaaaaaaaagaaaagaaaagaaagaaagaaagaaaaaaagaaagaaagaaagaagacaactccttgcttagaattacaaggcatataaaggaagaataccggtcattactgtctccattttgggccacctccccacctctgcacattagcatggtaggtggtcacacactgcctttttaggccatctcacccttctcaaggacaaaggtacatggatgtcctcatctattccaggaagatcaagttctcacaggacacactacctcccaagataagaaagttacccatgagggcaagacaatagagcagaaacgatcaccttgtggaaatcagactggtcccctcaagtgatgactcaagaaggacttcttagactgcctctctgaagcagaactggggacagtcatcaagggaagcacgctgtgagcaggactgcttaattgtgaagcctctctgtcccccattttatttgtccctatttataagcttgaggagagactgggaatcaatgattcatttatttgttactctctcaaatactcatgtttcatttttaatcctaaaaactctagtccgaaccaggagtgatggcgaatgcctttcaagcagaggcaagtgaatctctatgtgtaggaggaaatcctcacaagccttgaagcttctgtcttaagaagtgtataataaatggtgtgggtttttttttaacctactgagtttttggattgacttcttagaggtaaactataactcacatgattagcaatacactttaagtaaaaacagacatagaagaccacatttagatatagtattttccccttgaggtcagaaactcagctgaaggatactgtttaagccaaaagagaatctggacttccataccttgctgagtgactgaaaataggatttcccgaaagatctacaaatacatacctagtcactgatggaaaaccccttgggctctaagtaatcagacactgataaaggaacttgatcaggaagcaaagctgggcatctgcccttgccgcatcaagaaacagcacatcctaccagcattctaggttccagagcccaaaagccatcagcccagacattctgacatgatctccttacctacacactctccacagtctcctttgggccccactgctcctttaggccccactgctcctttgggcccaggaatccctggggatcctgcaggtcctacctttccaggaggacccggcaagcctctgagcccttcgcctgttggaagataaacaaaccttgggtcgatatctgtgcttttgctctttttccaaaagcttgatgtttaacccctgtggtgaggtaagtccccggtgatccatgagacagaccgacatgagagccactttccaggacacacaagaaaacatcacacacttccgtgtgggagtccagaatgccagagaactggaactttttgtgttttgagttagagaacattgctggtgaaaatgcaatatgcctaataagttttcctctccttgtatctctagtcggtttcttctggaatgtagtcacagaaaggggctggagagatggttcagtgttgatgagcatgtgctgctactgctgagggcttgagttcagttcccagcatccacgatgggtagcacacaattgcctgtaactccagctccaggagggtactatgtctttggtctccaaggtaacctgcactcaaatgagtgcattagtgtgcaagcacgcacactctctctctctctctctctctctctctctctctctcacacacacacacacacacacacacacacacacacacacagtaattttttaagagcaaagagcagttcgatgcatacctggttcacccttctctcccttggccccatctcgtccatctttgcctgggaagccattcaggactggacaactgcaggcaaccacagggcaggtactttgagcaccttcagttacagtctctgcataagatgctgttaccacaccaaggagaaggaaagatggaaacaggaacatggtccttaccttggtgtgggggaaatcatgaaaaattatctcatcctttacagttaatcagcatgtatataccaacctgacctcttgtcttgtaacttggggacagacattgtacagatggattcctcactgctagtgtccagattgtgtatttagaaaagcaagcacccagcacaggggaaatgttaagggatctacagggatgaccccaactaagaatccaagcagattggagaaatgccactggtggtggagaaaatgccattgatgcccttcccctataatgagattggtgtctaccttggttaccattcctagagccttcatccagtagctgtttgaagcagaaacaggcacccacagctaatcactgaaccatactactggaattcagttgtggagagggaggagggataagcaaaggagccaagatggggctggagagaccttcagaaacagtggacctgacctactgagagcatggagaccctagtcataaagctgaggaaacagcattggatcgaaccaagccctctgaatgtgggtggcagctaggaggccagggcagtctatgggacctctaacagtggagccagtctttaactctagagcacaaatggactttgggagcccattccctatggagggatactgttgcaacccagatacagcaaggagggcctctgcccttccccaaatgatatgacagactttgaaggtccctggtggagggcctcactgtccctggggaggagttgggggatgggttagagaggttggtggggaacatggggcaatggtagggcgagtgaatgggggggtgaatatgtaaatatgagtggtgattaaagaatttaaattaaaaaaaaggaaaagaaaggcaagcaccctttacgatgctgtgtggttaatattttagttgtgagcctagcctttaacggctgagccatgtctccagcccgtggttagtattttaacaaaaataggcataacatggtaacatgcagtgaaggcccttctgagggaggtcactagggcccaagcctctagtgtcactcaggcaagttatgaatgtgcttctcatggcagtgagaacagaacaacttcacatcacctactcactaatgcctggtaccttagtggatggggacgaagggagactcgatattctgaaggatctcacacacactcctacctactcttggacaccatctgcattccaaatcctatttttatgctggaacttctctccaagaccagttagttatcctttctctagtttccaacaataaactataggctagcaattaaaagagacagggccagaccctgatcccatggtaagtctacaagcccttcccagaatgcacttgagtgcacttcttggtagttcatttccatagagcaagacagggttgctagggaaagcatttgctctgtaaatttctctctagtagatttcccctcttcctcctagattgtacaagcccaaactgctgacaattaggcaaacctgcctagaatctctctctctctcagcatcacatctgtccttcaagactttcttcctgctgttcctcactaagaagcctaacatgccagtcctataggtcttagatgccatggcactctctttgtaatgtcttctttgcaaacagataattgagaaaactcacatgtcccagcaagcagagaaagtgctgccaccaatgtgacttctgtctgacctgcctcttacctcaggcctctgaaatgaatcaaaccccaagactgagaatataggaacccaaatgcactcaccagaaatgattttcagggctttggaagcttccactcaacctggaactcagacagagagagaggagccaaaccagattaaaaagagagagagataattcaagatgaccttcaaccccagattaataagcaaccctctttagggtgtgacattgctgtctgccgtaatgcagcaccatctctgatgtgtatgttcatcatattgattattgaataaagtacttgtttggccaatgagacagcaagttaggcaggcctaggagtcaaagaggattttgggaaatgtagtagagaagtggtgttccaggcaggaagtgacatagcaaggagactcatatttaagaaaggagaaaaaggaagtgtccccttttcccctctgctcttcctccagtggctcaatgtgatccaccggcaccaaggagggatgccaataaggtgtccgataagataagtcttataaaatatatagatttatgataattaagactgagctaacagatgagaaatccttgtcattggccaagcagcatttgaacctaatacaagtctctctgtgtattaatttgggccctaactcgggcggggggctggcgtaaagcacacatgtggcaatgggattcggcggctttggcagaaagatttatcgtaacacatctccccttcaactgatgtccattttgctaattctcatgactgagttaccataagtaagtttaagtggttagtcataccaactatcttgcttccaatacagaaacacacacatgcccaagcgcacacccactgtagacacatgcacatgtgtacaatataaaggacaatggacctttggctgctgtcaatgcatgaggaacacttctagactcctcactattgtcttctgcctgggatatcctcactctttagtgctctttctcttctagtctaagattcttgtctaggagaaacttcctgtgatcttatctaaaatagttctgcccttctcttgggctgtgtttgtttatactgattacaatgcattgttttatagtcatttaatgtggtaaaatgtatataacatgccattttgaccattgttaaatgtgtaagtctggaagaacattcaggttattatgaggttgccagaacccatctccaacaatatttcatcatcccaagctgaaattctacacattaaaccacataatgacccaactctcccctccttaccaccactgataactgccattctcttttctgtctctaagaagttaagtattttagatggaccacgtagttggaatcatgcaataactatcctgtggtgttagagggagcagacaacaaatatcttgtgggtaaatagtcttgctttgttggtcgactgggtcagtagagtagaaatggcgcaatattttttttttttttttttttttttttggtttttcaagacagggtttctctgtggctttggaggctgtcctggaactagctcttgtagaccaggctggtcttgaactcacagagatccacctgcctctgtctcccaagtgctgggattaaacgtgtgcaccaccaccgcccaatggcacaatacatttaagaagtacaattcagtaaattctgaacttcatttcttttttttttttacatttacttgtgtatgcctgtgagcatgtgagcactcgggtgtgcaggtatgtgcgcacatgtgcatgtcatggtacacatatagaagtcagagggcacagagcagtttgtaggagtcttcttcccccatgtggcctctgggactcaaactcggatagtcaggtttggttgccagtacctttccctactgagccatcccaacggcccctgagctacctttctaacatagctgtttttcagtgtcagtatgtttttctctgctctaagaaaataactgaggtgactggcttacaaagaggaaaaaatcatttgactttatggtcggttgttcctcttgcttctgtgactgtgatgaggcagtgtctcatggtgcagatttaaagcagaagatggcttatcaatcttcaagccagaaatgagaagagggagaagaccagtttacaagctttccacaatctatttaggagtatcctccagttacctaaaactgcttcctaatctccatctcttaatggttttatcacctgccagtagcgccccaggccggatactcagcctttactataaggacctttggagaagttccaggtctaaatacatcagctgccatggaaaagccaggttagcttggagtactgagggaacccactgggggagtttcacacagagacttggggtggtgtggtgaaggccaccaaataccagaataaatatggttgagaagccctcagaactgggcttacaaagacctagtttccttaattcttgctgatgtatcccagtgagagtaaaactgctcagggtggtatacgtccacatggctaaagcaaatgtctactgcttcagggcataggaaagacaggaagcatcttgaccttacatctctttgctattcatagccagagcttccctcccccaaccctcccccctgaccccggttcaatggcagaaggtaatgtcaatagtccaatagtcagtaccaggtcacactggaggtgcagtctttgatcacagtgtccattttttttgcatttgtgtgtacttagttcctaagtcaggaaactgcctttcagaccctgaccctgccattcctggaaccagtctggatgagcctccaaccagccagctaaccacagatggcatcgctgtccacctgaacagcttctcccccagtctttcaaaggactgtcatgccacaagagttccttgtccacatgtattgtcaactgctgacacacagacaaggtgtgcatttttttctggatcccttatttttctgacactgcttccactctggtgatcccactggaaatccacctcaccccaacaggctactaagataatggtttctctgccctatgtgaaaaatgcctgctcatcctctccttgctaaggtggaatcccagctctgacacttcctggttgtgtgagcttggccaagttctcctgccttatatactcagtcctctcttctgtgtaagaagacacagccacctaggctatggagtggtgtgtgcctttgttgggtccctactcacagcacaccacatgtttacaggggcagcctatgtagatggggtcttcgccttctccaggatgactgcagagtggtattctcacctcagaagcagtgggcttgaagggaccatctgaaagcccttgcttgagacttgggatcaggaggcttgattttgactcatgcctggagtttagaccaatcacatattctgactgaagttctgtttttgcatctaaaataaataaataaataagattttgagcttcacttctcttttctaaagggttgcctcctcccagtaaagatcattaggaacatgcctttaatcccagcactcgggaggcagaggcaggcagatctctatgagttcgaggccagcctggtctccagagacagtgccaggataggctccaaaactacacagagaaaccctgtctgcatggacattgtgcataatgattcgccatggggcttctcagctacagattgtcaaaggattttttgtgggatttggcttgttctaggtgttttaggataaactgaagagcagaagcacaagcttcctccatacaagccccgtaagaagaggtgcactcatctgggcggtggtggtgcacgcctttagtcccagcaattaggaagcagaggcaggtggatctctgtgagttcgaggccagcctggtcaacaagatctagttttaggacaggctccaaagctacacagggaacccctgaaaaaaaagaagaagaagaagtggtgcactctctggttgagcgtctcaattatgtctggtacaaaagcaaggtaaacaaggaagcttctgcgaggtgtaaaatagtggcagatgttcaaacctaacagaacagcagcatcttttccagttgtgtaattccttgaatgtcccttttggtttgtgtcgatgtgatttcagaatgattttgtgattcacggaagagtgattttgatttctgttgctgttcggtggggaatacttgtggttcggctgtgaggggcagcagagagaagtgctctcttacgtctggtgtcctttacacccgttctaccttcgcattctctccatcttgcattcttctaagctcccatctatactatttttccttgcttgctttttgctaatgaacaccatgaagctaaagatgctgcacacctcttcagcaaagacgaataatgtaatgtagctacaccttctgcggtgtgaactgggagggatcacacgtgcccacagagggaggccacgcccgcctgtgacatagatctgagcacagggtgagtagtgcagaaaagcattgaatgtaggacaacaaagacatgcccattgccacatcaatgagatcctatgccaaccttggaggcctctcagacatgtattcctcttgtcctgcccctgcttctcagaaagagagggggggggagagagagaggaagaaagaaagaaagaaagaaagaaagaaagaaagaaagaaagaaagaaaatgagagcttgatggcaagtaacaacacacattcaacttatttacatttgtatgtctccatatctgggcccctcctgtctcgtctagagggttacagaataagacagggcagaggtcatcgggcaaagggacacctgagaaaaacaaaggtctctgctgtgaagaggttgaaggaatgcagccagcacatcagaaagaaagggaccagaaacatacaataactcaaacaaaatcattagaaagaactgattagtaacataaaataaataactttgatgaagaaataagtgaaggttctggtcatccaaaataggcaggagatggcacaaaagcaataggatagaaacattaaaaaacaacaaaataatttaaatactaagcataaccaggatgtatgtagctgaagaacataataggaaaacagggttttagagcaaagtggaagatgatccaggcttagaaacttggacaggtgaaagctgggaggccagaaacagaaattctagtgttaatgaaaaaggataatagctgggcatgatgctgcatgcctttaatccgggcactcaagagggacagtcaggcagatctctgtgagtttgaggccagcctggtctacatagtgagtttcagaacaacctgggctatgtagagagaccctgtctggaaagaaagaaagaaagaaagaaagaaagaaagaaagaaagaaagaaagaaagaaagaaagaaaggagggcaagggagggagaaaaaagaaaacagacattaaaaaaaagaacaaagaaaaatgataaggcattctgacacatgaaactgaactgcacaggttgtattcagcacctcaaacagtctcaagcaagcaagaatggaacaaacagagagatcagtgcaatgttcctgactctggaattccagggagatgccacacgggcacactgacctttctacactcagaaaaatgccatgctggagtacttaggctgctgctaattagatcaagtctccttctttattctttattaaaattaaacaaaatattttctgttgtctgtttggggttttttgttttttagtttttgtttttgcttttttagggggatcaatgggatagcgatagtgcttcaaagacaatgtgataacctgtcccttagcaaaacaacagtagttaatgataactctgggatcactgggagaaggacctgcaggcatttctgcaggctagagatgagatgtgaagtacctcggtgtattaacctgcttcctcctcagagtgtagcctctcagaataaacagcgctgtaaagactcagttcctctctttgttcattggacattgtgatggcaaggattccagctacaattatttgcttattatacccacatgtgtgtctatgtgtgcgttcatgtgtgaggtgcacatactcatggctaaagtgtggaggtcagaagacaaccttggtcagccctcgagcattttctatcttttgatctctcattggcctggaataaaggtcatgctagctggccaaggagattgcagggacgtgcctgacaatctctcatcgagccatcccccggattacagactcatgccttgtttctatggatggaaatggggaatgagatctgagcatctttgcttgcgaggagagcatttacaagaggagtcatctcttcagccccatccagggttataagttgaatctattatgagctgaaaaattgtgacatagacaatcgcttttacattagcctccattgcctgccagtaaaatgggcttaaggggagcactcatgaaccagaggagtttcgagagagttgatcattccccctactcacaagaaatgcaagcccttgtcagcctcaaaaggagatggctccctgggatggaaggtggcagacgcatggaagtgcctaagtgggattgatggagaaatactgtccatgtcgattcctctgtgtaaagatctgtagaatggtagaaaggaaagattttatcttcacaggcagctctatattggctctgggagccactgtgagggttgagtacacttgctttaagaatcacctgagaaaaagcatttggtttacgctcatcacatcctaacagaagccagccagcttcgttatacagagatgccagggacaaacaattgagtgcttgagtatccctgatcttcatcaggccgtccagatttgtgaactggttctaaagccgaggagtcacacaccatgaagatatacaatctgtcacaatgccatctacagtcacacaacatgaggacacaatctctgtcacactgccacccacagtcccttctgaggcaaagctgaagctctgccacttttctgcaaaataaccagtggggtcagcctcttgctgtgtgacttccctgccatgatggactgtaccctcaaacctggaaggagaatgaagatgagcgcaccagtaaatgggagtccaagaaatttctagaaggatggaagctccgggctactactccagcgtcgtgcctgtccacctgccgtcatgctccacaccataatggtcatggaatcaccctccaaaactgtaagaccagtaaactcttctatgagaacaaggagatggaggagaaagaagatcagcacttgagagaaacgagtatagtgtatttcaaaggatactatgggtcatccctgccaccttctggccgtactgagaactgcaataagccaaactgcactgagagcatttattggatacccaatatatgtctttctttgctctttaatttaggggcaatatctcacttgcagcacactgaattggttcacaggacaccatgtttgttcctaagttctgtgaccccacagaagtccttacatgattaagcattaataatatttgtggccatgatttgtgaaagggtacaagtccaaaagaaaccaggcacacacttctgagggtccttccctgcatagttagaaaggttcacccaatttctccaggaagaaacagtaatgatacatgaaaaaattaccctgggggaactcatagttttaatatccatgttgtttattggatacagacatacatacttgataaaagcaacttaagaaaaagctgtttattttggcctgcagtttaagaagagataaaaatccatcactgtggaagggcatggtagtaagagatagctgttcacattatatccagtccagaagcagaaagagatgaatgttggttctctctcccagtggattctttctttctccattttttatgcgctgtgggaccccagccaaggagatggtaccacctacactcagtgtaggtgaaggtcttccctcagctaaacctccctggaaactctctcaaagatatactgagcgtgtcttgaaatccagttagattgacaatgaaaattaagcatctcagcatcacaagcatcttctgcatggcatgcacattctgcatggcatgtgccttctgtgtggcatgcaccttctgcacggcatgcgtcttctgcatgacatgtaacttctgcatagcacatacctgctgcatagaatgtaccaaaatcccagactcctagaatgacaggaggactttagcataagtcacattgttcacacacagtctaggttcaataaaacatttttctaagttctggggatgatgagaactcttcagagttcaggttcctggcaggaagttttcctgatggagttttgagagcagcagccaaagtggatcggagacagatctaaattagcagagcagtcactaatccacagctggccaagcagggtttggggacagcagtcaacagcaaaagctgcctgagaactacacagacctgcaggatacgctgctggagggccaggtcttagcctcaagtacctggaaaaggtgctggcaaatggctcaagggtaatgagctgttggcctctgatactgcactcaacagaagcatggtcatggttaacaggaaaacatggcaaatagatctcttattgcacagcaggcaagattcatgacactgtgtttgggtacattgaagagaaaagctggggtgttacaccttcctctgcacccagcagaaaccacttggtagggaaaacagaaaactaaatgaggcagttctttttcttatttcttttctatatattttgttttcttttatttattttacatcccaactaccctctcctctcattccctcccccacttccttcaccccctccccatccactcctcctctggtattgttcagaaagggacaggcctcccacagatatcaacaaagccaaagcatggcatattaagttgtagaaagactaagctcctccccttgtattaaggctgggaaaggcaattcagtatgaggaataggatctcaagagccagacaaagccttggggacagctcctgcttccattgttaggagtcccacaagtagaccaagctacacaactgtcatgtgtatgtatatggctgaacccatgcaggcctcctggtggttcagactctgtgatctcctataagacaagttagttgttgttgtgggttttcttgtgatgtccttgacccctctggcttctacaatcctttctctctcttccacagggttcctgagctaggcctaatgtttgactctgggactctgcatctgtttccatcagttaccagacaaagcctctctgctgacaactggggtagtcaccaatctgaccacaggagatgatcaattcagcctatatatacactatttcgaggagtcttagcaggcaccatccttgtagattcatgagagtttcccttgcatagggcttctgcctggccctgaaatgcccccatccatttccacaacctgacccctcaagttcccatcctcccctgcccccagtccacttaggagctctcttctattccccttcccaaggagatctatgtgtttgttcccccttgttacccagcctctctgggtctgtggattgtagcatggttatcctttactttacagctaatacccattcatgagtgagatgttgggacagttccttttaaagggacagtatctcctgggactctgaagaggatagggagagcactaggggctgcagtaaggctgtgatcatgtgcctcagatgcctgactcccctcatctcagcaatgtgatctgttgttttggatgttactgtaacacttctgtcattagtgtgaactggagttataggccttgtaaggattagctatgagaggtgggaaaccagaggggtctccccaaaagtggaatgggaaggaggggggaggatgcgagggggtgactttgatgaacctagatatatatttttaaaccataaaaattaactctagtagggtggtggtggtggtggtgcatgactttaatcccagaactcgggaggcagaggcagatggatctctgtgagttcgaggccagcctggtctacaaagtgagttccaaaacagccagagctgttatacacagaaaccctgtcttgagagtccatctcaaccatatatacaatggaactttattcagtcaaacatgaaattgaaattatgaaatttgcaggaaaatgaatgatgtggaaactatgatattgagtaaggtagcccaggctcagaaagataaataccatatgctccctctcaaatacagattttaatttttatatgtgtgcatgtatgtgaggggtatagcccattaaactagagaggagatggagagggagaaattaggctctgaggaagtgcgtagggatgaaaaagaggctactagaatacacgtgacatgaaagtgcagaggaaactactggggtagggagggttcaggcaggggccaaggatgagggagagaaagcatggaggcggatcaacgggaaatgcagaatgaaatggacagctctgtcctaattaagaaacacagaaagcaagagcaagcatggttggaaaggaaagctagaagccacggtcttttttttatcatttttttatttgaattagaaacaagattgatttacatgacaatccgagttcccttctccttcccgtccttccctaccacctcacaactaaaaccctacctatcgctggcataactggatgcaaacatgcagaagactacagatagacccaagcctttcgccctgcacaaaacttaagtcaaaatggatcaaagacctcaacataaacccagccacactgtacctattagaagataaagtgggaaatatccttgaattaattggtacaggagtccgcttgctaaacatagtaacagtagcacagacactgacatcaacagttaataaatgggacctcctgaaaatgagaagcttctgtaaggcaaaggacacagtcagtaagataaaacgacagcccacagactgggaaaagatattcaccaaccccacatctgacagagggctgatctccaaaatatacaaagaactcaagaagctagtctccaaaacaccaaacaatccaattaaaaagtggggtacagaactaaatagacaattctcaatagaggaatctaaaatggctgaaagacacataagaaagtgttcaacatccttagccatcagggaaatacaaatcaaaacaactctaagataccatcttactcctgtcagaatggctaaaatcaaaaccaccaatgacagtttatgctggagaggatgtggagaaagagaaacactcctccactgctggtgggagtgccaacttgtacagccactttggaaatcagtatggcgactcctcaagaaaaggggaatgagtctaccacaagatccagcaattccactcctaggcatatacccaaaagatgcacattcatacaacaaagatatctgttcaaccatgttcatagcagcactatttgtaatagccagaaactggaagcagcctagatgcccctcaaccgaagaatggatggagaaaatgtggtacacttacacaatggagtactactcagcagaaaaaaaacaatggaatcttaaaatttgcaggaaaatggatggaacttgaagaaaccattctgagcgatgtaacccaatcacaaaaagacaaacatgatatgtactcactcatatgcggatcttacacatagagtaatggattaccatcctacaatccacactgccagagaaactagtaaacaaggaggaccctaaaagacacaaactttgtcccctggagaaggggaaagggtcaccatcccctgagaaaattgagagcactggaagaagaggggggaggaagctaggagagtgagaagggaagaagaggggggaggaagctaggagagtgagaagggaagaaaaggaaggatgcagaggtcatgagggagcagaaaggttgagtcgggtgtagattagaagaaaggatatgtgatagttagggttttagttgggggtggtagaggaggaagggagggagaagggaactgggattgtcatgtaattcaatcttgtttgtaattcaaatatataaaaaataaaaaataaaataaaataaaaactctacctatcacataccctttcttctattcttcccctgactcaacctttctgctccctcatgacctctgcatccttcctcttcttcccttctcattctcgtagctccctctcccctcttcccatgctctcaatttgaagccacggtcttatagtcattacttcatcatgtctgcctccttcctgagttcagtcttcatgatgagttagaaaggactttggagacctatttatgattttttgatttaacattgcctgtgcctgataattatctcctgcattgttttggaaagacactttattcaaattgtaatggaacaccgtctaacgatgagcaaggataagcattgatttatttcataaaacaaaatcctaaagaaatctctgtgtgtaaaataccattagaagttcacagtaaagttttctatgatgaggaggggtcgatcttctcctttaatcttttttctatccttgtttggagaacatatagtaggtgattcaatgtccaaccttcagttagatgttgccttttttctagaaaaatagatctaatgaaaatcagctgcatattagaaaattctgttaatcaacagtttgataagaaaaaagcaagttgggaaaactcaccttgctactacaactaaatgttctctgtgggtctcaatgcacttttgttaaagaagtaaacatatctcctggatctttattgccacttagcaataaataatttatggattctttgatatgagaaagaagaaactttataacttgtataaaatgcatgactttaaaattatactataaattaaactataaacacaaaatataatatttctggtaaataattacaacagggaattcccatctttatcagtagaattcttggtgacaatgtatttctattccaactaatctatattcctctgtcacacaaatgaaaagctgaatttctaaataactgattaagtcctcccttctctcacatcctgccatgaaactgatggtgaatatttttcctatgaaacctatttaaaaaaaaaaaaacagcaatagtccgatggtggtggtggtggtggtggtggtggtggcggcagtggtacacgcctttgatcccagcacttgggaggcagaggcagctggatctttgagttgaagatcagcctggtctacaaagtgagttccagaacagccagagctgctacacagagaaactctgtctcaaaaaacaaaaacaaacaaaccaaaaacagcaatataaaaagcccggcagtgatggcgcatgcctttaatcccagcacttgggaggcagaggcaggcagatctctgtgagttcgagaccagcctagtctacaagagctagttccaggacagcctccaaagccacagagaaaccctgcctcaaaaatataaagttctttgtgtccatatatacacacatattaccaaattattacagtaccttattttacaacattatgagcaacacggggtatatattatcatcatcactctcagtcaaaggcaaacaaaatctttataacagttcatgccactgtttaaaaaaaaaacttgtagaacacaggtgcaacttccaaatgatgatcaaagcctcgttcagatgatgcaggtggattgagtaggatttgtagcagaggcaacaacacagtgcgccttccagggcttcctcaccctgcaagctctaggtgatttgcattgaaaggcaaggcagctttataacaaccccagcctaatttgactactttgaatagacataaatatttttaaagatgaagggttttagaaatttagaagactggttataatagtcaattcatagccatttgtttctgaatcactcatttatcctctataggtgggttctgctgctcttcaatagatccctataaagtaaaagaggaagaaaagaatgaactcattctttttgaatgaattcagcttttttttttttttttttgaatgtcactagcttggccctgcttctatgaattgcagagtataaacttttatgggaaataaaaaagcagttttgcttaatggtttttaaaagattgtttaaacttatctgtgtatgtgtgcttgcatgagtttatgtgcaccaccagctcgctcaagctgaggaggccagaagtggccatcagagctcctagaactggagttacaggccgcagcagcttgccctgtggattctgggaatggaaccaggtcccctacatgggaagtgaatgttcttaattgctgaaccatttcttcagcccccaagaatttatttatttaacattcttaaagtgggctttttatgtttttttattttgttttgttacttactttttgagaaattagcctcatataaactcttcagtgctattatttttcataaacctgtttttacaaaagaacatacagcaaactaaattctaaagagggtgttggtagcagtgttgagcagggtgctggtagcagtgatgaacaggagctccagggtagacctcttcgagaggataaaacttgagcaaagtagatgaagagatcaggtcaaacaatatgggagaaagaatgttctaggcagagaaggtagctgaacagactccaggagaaacatatagaataaggccagtccagcatagaggagtgaatggaagtgagggtgtggtctgaactgagagggctggctgtgacagggacatgaggtggtcctccagacccaacactcccctcacccacctgatgtgtgttactggatatttgttcacactgatactccaagactggcaataaagttaaccttgaatccgagggtggagtcagcaattggctgactggaattagtcactgaggttctggaggacaggggtggggggtgggggcaggcacaggaagatataggcaggagtttagagagattcgatctgggaagcatgaagaggcagggtcagctgatcgttcctctgctactctttggatctgtcaggtttttagtgtttattaataatagaacaacataagtaaatgtttcagatatgtgtttttgtttaatgtcccctataactatgaagcacattcccttgtgtatggttccttcgtcacaggtcatgctgggtatctcacacattggtctatgcctttctcctatgggactcaatttgtaagaaacacacttggtccaagttgaccttgttctatttccttcgtgcttgagatggtttgaggcagaagtttgtgacccagttccagtcaatggtaaatgtggacagtgacgatctcctacagtagtccatcctgaaggatggcatgacagagaagacaaggtctccttggcttacagtgagcagtaacgctgaagatgtgatggctgaggggaacagccaccttgcaatagtaagggggtgacaccaacactcactgcataatgatggatgtaggtgactggtgaagggaggcaagaaagagcaccatgaaaagactcaggcccctctcccttgcttcactaaatcatgaagtgagtctcgtcacagatgcacaatggctgctgagtcacattgtccagtgttggcctttctagaacactcagggtcttcaggctgtcactggcaatatcttacatcctaagagaccagaactttttccagacctcacagtcaaagtgaataatataccttgaagtcacttaagacttaagtgactgctagcccactgaatactcagcctgtttgtttaacctgcctttaagagaccaatgtaacaaccaaccttgtttgccttgagtttcccatataatcaacttttacaacataagctaatgcatagctgcaatcttaagttatgtactcttgcatgctcctgacctgtgtgtatcaacttgctgaaagcagcaaatccacaaattgaaaagcaacttcctaaaatctaccatccatttacgacattggctgataaacaatatttgttatctaggacacttgggatctcttggagccagtgacttaatcccttgtaaaactctgttaaagatttctgtaaagtatcctattgcttcccccatgtgatgatctctgtgctgttcaataaatacagagcaaaaccctttgttagagacagacactattcacaagagcgcgcacacagctcatacagcagacatcacagagagacagacagatacagggatagacagattcacaagagatgtgacaccaatgcattcctggtgacttggagttaatcactaatgcctttaatccatgcccatcgccattctgctgactgctgtggttcttccttccctgagcctgttttgtcctctaacaaaagggaccgtgggtttttaccaggtttgccccttgaggattggaggatgtgaaccatcggccagaaacagctccatatcagatgttgccaaaagtcatcaagtctccggttttgactcagtcagtggccatctgttttgtgtctgagtgcttggaaggaagcaccccagtagcaatcagaaagtcaagcttttcagcccaggtctcagtttatccagctggaaagaacagtcagagcttaagcagctaatggcagaaaacccaacccaaaatggtgtagacactccggcagggcaaggcattggtgaaatcagcaggtgcaattgcaggtgacttcgagtgaagctagacctcggagttagataaggacttgggaagcacttctgccctctgccctctgccctttgctctctgtcattctagtgagagctctgactttaagttcacagagttttcaacagtctcggaaaccctccctcatgattccaaccctgggacctgacttgtgcaactttattggtcacatgaccaggcactggccaattacacttgccatggaaaacacctctgtttattgagcagatggtaacagtgtggctgctgtctccaaggagcctgggagctgtctcccagtggagtctcttgagatgcccacagcagtggaattcagggtgaaagtgttatctgctgtctgcctcacttcctacactgtccctgcccttgctttcctctcgaatacactaggcttctcttcaggcaaatacatgtgaggcaaattcccatgacaacagttaagtggggtgatgtccaggaccattcatggaggtgtgtgttgatgggaatagactcttccaggaagtcacaactggctaaagaaatgtgggtccggccaggtgactattagaatagcagtgccttggattggtcctgtcatgtggacaaaggtgacattcccagaaagctcttggcaaccatttcttatcaagagtctagtagcaaatattctgggtccacatgccctcttccacagcttgcctctgtctttgttgtaagacagccactggcaacacgtgtgtggcttgctattgcgcaatccattgatactctatctgtggacactgaaataggaatttcatacaaagcagtctaccctgaggacccttttcaacactgctcccaacaccatgtctaacactgctcaaagacaaagtaacacttccaccaaagttcaacttgtagaaccagtgagtttactgtgattctttacaggagtatgagtgagggcttactacaggaacacggatgactcaaggcagctgcatccctgaagagagcacccaagcataaacggagtgctcttcttgcagtcagctacccagatcagggagtctcatccctcccagaagttcttgctgcttatatgatgtaggggcgggggcttgtggggcttgtaagtttcgtgaactccctgagacctgctaattgtttgtttcctgaaaaataagagccttcctcaagaagggtaatgtttaaattcagagaacattgctacacagtccatgtccagcttggtgcacaagctgcagcatgcataccctatctgggatggtcaaatggcaagcaaaatagaaagaaagcagccaaagacatgcccagaggggaaccctgttgtggggtttcagcagacttctacatctctgtgaaacaccacctggaatgacacagcccatggtcattctggactgtgggtatctctcagggagtcctctagaaactgagctgtagctgatccggcatctaggattgctccctctcctactcagaaacttgctgggtgaatgccttctcctctctgggccattgttttctcctttgcaaaaggaggtacttggagaaataagcttcaactctcccagctctggagtcctgcaatgggattgtttaacaagcgccccagcaaggtatctggctttcagcaccatggacaggatgtggcaagccctgagtggggttcacctgacttgactctgcaatcaaaactgatcatcactgagaacacccaagtgtcacgcaaatcctggggctccctgtgagcctatgggcagacaatgtctcttaaggactcggtgctcctggcttctgaagcatagctggatggggctcacgtggtccataccctccaccgttccctgctatcctgcactgtcttatagtgttttgatttctatgctgttggtaccagtgttcacttatggaaggagtacaaagaggttgaatgttccatggcatcaatactaaggccctgtggtttactgggtacctatatgtgaccatgccctgggctctggacaagcagggacctagaagagagaactcggttgcttaggttgttattcttcactctcaggttaagtcctttttcaaggaagcaaatgctttctttctagagtgattaatttgaacaaatctctggacttatcaacattcacactgtatgtacaataatatgccctttatctcttgctctgttgatttctcagattcttttgttattaaaaatgaaaaagacagtgcactgtggcacattcttttagccctgacacttgggaagcagaggtagaaggatctccatgagttcaagcccagctttgtccatatagtatgttcaggataatctaaactgcataatgagacccttgtctcaaaatctgaactgtctttaccttcccaagatgccttgtcagagagcactgaggggtggttttccattgctgaattgacttgcagatgtctgaaatgctatcttccagctaaattgcccaccatgctggcagcagagtcagtcgttacaacacacaagtccacatgatgattttcctgtcactgtgatggagtctggtcccttagcaagaaggacaacaaactgctccctttactgcagcattgcattaagtcatcaagccacctactaggtgttcggaaattcaccaataaatacagagagctctattttcctatctaacagagaaagccagggtcagtcactttctccttgtttgttgaaccctccaattaaccaccaacaatgatagattagatattgtatccaaacattatacatagcctagtgtttagaggagcagtaaacatatgacataccttttgtaaataataataataataataataataataataataataataataataatgtttcagggctggggagatggctcagtgcctaacagtactgattgctcttccagaggacccaggttcaattcctagcacccatatggaggctaatcaccacctgtaatgccagctccagtgccgctacaccaacttccctcatttttttgttttcattcctttcttctttttagttagaagacaattgtacataaaagaatcatttctagttgctagtcttgctataagtacagaacaggagtgagggtgagaaaaataaagttatattctatatattctatattcgagagacttaaacattacaagtactgacccagaatgtttcttaccaaaaaaaaagccctagtgatggacgaggagaggagaataaaaaggtttaacaaggctgtgtgttattagctcccctttgaaggctgttgtgtagaatcccagcttcagtgctgaatggccctggcagaatcacatcactattccactgatttcccttccacttaagatgcagcctccagtccactgtagaaagcagatacagttgctaggcaacctcctcctggaggttgggaatagagtttgatgttggaggaagcagggtagaattcagcctgtaatccagcacagaatggctgggacagacagcatctgcaaactctacacatgtattttaattccccacaaaaatgattgaatgtaactgtgattttttgtgccagtttgactattgatgggagaagatgagggtagatggagaaggttggagggggaggcctttcagagtcctcctacttctgcaatgaataattcattcaatatcttacacagacaaaaactggggtggataggtcaatgtaagtgactttctctctgcagaagggaggggcacagaagacatggttagttttattaaggaccaaaatatgagcattgctttttgtttttcttttttccttttaaaatgttaggttaaaaaataacctaagtaagccgggcagtagtggtgcacacctttaatcctagcactcgggaggcagaggcaggtggatcaatgtggtttgaggccagcctgatctgcaaagctacagagagaaaccctatctcaaaaagtaaaaaaaaaaaaatcataaatgttgggttttcagattttatacctcttccctgaagacctattcagaggagaaattttaagatagtgtttacagtcaatcaggtcccttgaacccagaacctgtgtcttcccagcccagacttctccaatctttgaaggcaagagtgagtaccatgaccttgaggtgatcagcatcaatgttccaccttcacaggctggatcctcatggctgccatctaggcacttgctggatttgtcccatgtgctgacatcagaaagaagcaaacttcgggaacacagaaaaagagaaagaagcatcaccagggtatttcaaattagagaaagtctcctaacatgcctatgacacaaattaggcaccatgtgttttcactaaagctggccattagtgccttgaaatttgctgacattcgtgctgtttttgcaaaaccatgtctctaagaggattttccatttgaatgcccaaacattttcctaaagatgtcaaatgtcttccctcacccagaccactaaagacagatctgtgcctttcctaaccttgtcttagctgtaacgtgtagaaagcatctttaagaacacaaggtcagaagttgaactgcaggaccccagttcccacatcacagcttctttggtgctcttggctgaatcaggacagatagatggcaatgtcagacatacactcactgggatcactctgctgtgaatgaccagtgtgaagatcaaaaactcggcatgacaaatggtcaacaacaccttccctgtgttcacatgtctcattcgttaatagcactagcacatgaagaaactaatacccagtacccacagtccagtccataactgacaaaatgggacatggcttcaatggaagaaagcaaaggaaagtgtctcgagatgacagactacactgtagtctaaagacctgttggattttgttccggggatttcagtgctgggataaacactggtcctcacatgtgtttggcagctgctccatcactggcatcatacacagtccctgtattaatttttttaattgggggaggatgggtagatatagagcattgaacccaaggccccatgcatgccaggcaagcactcaacctctgaactgcagcccacaaaatatgttgagaagtggtgggtggtcggtgcagtgctgcaaacccagctcctgtctcacttcaatgtccttaaatcttaaatctggtacccaaaaacaaaatagtattaaaattgtccttgctgggtgtgtgtgattttggaaagtgaacactagatggcagcatgtgggcaggttcgtttgaatctcctagaagctgcctcaggcccacatccggattgcttcagttggaacctcaattgaggaaaagtatctgtaaatgtaattactgtattatgtgagagatgaaggcaaaaatgaaacttttctgacatttgtgtccagcactcactgttttaagcacttctttttcaaagagcaaataaggtctttgaggacacaacaggaccagatggacacacctagaagtatccttacataaatacttatttacatatatacacacacataagcatacattctactataaaaaataagcaagaggtgattttatcttcactgtagtgaaagggtcatagatttttaatctcgtttctttcctgttagtctcattcatgctttcaaaaactatttcttttttaactttcttttagatttatttatattattgtatagatgttagtgctttgcctgaatgtgtgtctgtgaactacctgtatgcctggttcccgcaaaggcccacagaggatgctggattccttggaagtgaagttataaatggtctccacgccctcaacaactatttcttaagtacattgtggtcaaggtattaagtgtaagccaccccatctccaaatcaaaacccagttccagccagagtatggctaatatcccacatgttctaaatgcccttgttgtaaaaccatatgcatgcatcaagggatggggcctgggcttgcttacctctgagcctgaggacctgagtttgatacctggaatccacttgatgggaggagagaaccaactccctcaaactgtcctcagacctccacatgcacacccaaatatgcacaggaggtttctctccatctcgttttctcgagctctctctccctgagatccaggccagcttattctacatagtgagcttcaggaaagccagaactatataatgagaccctatctcaaggaaggaaagaagagaggaagggaggggagggagggaagagagagagggaagaaagaaagaaagaaagaaagaaagaaagaaagaaagaaagaaagagagaaggaaggagggagggggggagggaaggaaggaaggaaggaaggaaggaaggaaggaaggaaggaaggaaggaaggacaaataaatacagccaggcattctgataggataagtgcctgtaatcacttccagctactctgaaagtaaaggcaggaagaccatgaatgcaacaccaggctgggcaatgtagggagacctcatcttttctcacccaagataaaactgatttgttttcctgatagacaatagtatatgcaccttacaggatggtagagttttgataggccaggtgctgcagaaaagcatctagacatagcataacaaagcacatgaagtccacagagtgtggggccagacagcaagtattctggagggaatacacataaatacagcgcatccctttttagacaggatattgctatatagcccaggtgggccttggactcacaattctactatcttagggccacagcctcccaaatgctgggttagtaatagatcaccatactaggctaacagccatttctaatttttttacattttgagattataattttattaatttcccaccttctctttcctccatccaccccctcctacataaccctcagcactactgtctttgaaattcaaaacctttttttctttaactgttattgcatatatacatacatataaatatacacacggtatgtatttctaaatacacaaatacaacctgttcagtccgtacaatgttacttgtatgtgtggtatgggctgaccacttagtactggatggataaccttctgctgtgcttttccttggggaagacgacttctcgcactctcgggcattccttagctgcctgtggttctttgggtagggttgaggtctcatgagtttgcccacttgcacttcagcatatccaggcagcatgctcatgtttaggcagccatgttggtgggactttatgggtatagcatccctggtatttctagaagacataatctcaaagcaaacttccccatttcttttcttttctgtgtttgtttgtttgtttgtggggtttggggttttatttttgtttttttgttttttgggttttttttttttttggtttagcaagacagggtttatctgtgtaacagtcctagctgtcctggaactcactctggagaccaggctggcctcaaattcacagagatctgcctgcctctgcctcccaggtgctgggattaaaggaatgcaccaccactgcctggccaaactccctgtttgttacaatcttacaattggctcttacaatctttctgcctcctcttccacagtgatccctgagccttaggggtaggaattgtgctgtagatatccattagggactgggctccacaattctgcattttgattggttgtggtcctctggaattgtgtctatctgttgcagagagaagtttcattcatgaggggtgagaattacacttatgtgtgggtacaggataaatatttagaatatacttagggagtatgctgctttagttaagtgattgcaggttctgtcccaagatccatgaagtcattaaccctgggtaattggcaaggtttccagtaccaaacatgatctccctcattttgagcaggtcttaagtccaattagagggatgttggttaccaccaaggtatgcatgccactagtgcaccctcagagttatcatgctatgctggtcattgctgtggctcatatgcatcagagctgagtaggagtattgattgcttccctcctttgggagcttgcatgacttgcagccattcttttaagcagacgaattttttgtttgaaatagcccctgagccagatgtgaaaatgcatggctgcaactccagtgctctagagtcatgcaggaattggcagctcaaggttagcctggactgtgttagagagacgatctcacaaacaaacaaataacaagagatgggggatgcctacaaagtacaccacgcctggctttgtatgcattcatcttagtgtgtgtgtgtgtgtgtgtgtgtgtgtgtgtgtgtgcgtgcgtgcgtgcgtgcgtgcgtgcgtgcgtgcgtgcgtgcgtgcgtgcgtgcgtgcgtgtgtgtgtgtgtgtgtgtgtgtgtgttttccaagttaaggtgggagcctgggtgatttgactgcctggtaccccagctatcttgagtgaaagattgtcagccaagccaccagcaagactgccctcacacctggactggctgctttgaacattccagagacacctggaggaagctacacaatagttatagctgcttaccgttgaagaacaacttcaggccagtagatactatgactatctcaaaacagcttgcttcacatgttttgccatcacagggctcagcgcactcgaggtgacctgctggtcactttcactcagactagaaggaaagcacttcgtctgatgagccaacaaaaggcccgtggctggtacaagaatacattctcttttgcatgaggaactctgtcatgattgatgctaactgtccttctagggactgctgtgacaggtgcacatgcccagccatatcctctgttcctgtcagtaagctgtttggtacagtggccatctggtagctgagtgagttggcacacatctgtgacaccgaaccatgagtgacggcgatctctagcacccaaggattgaagttacatgccgtatgcttaatttcaagtgtctggccctttctttgaagctcctgcttgctagaactgttcctgcttgctggtctgctataacttaaaaaataaaataaaagagattgacctagcaagtgctggcagcggaaaagaaaaaaaccctttcttgccacaaaatggctgccactagcagcatctcagattccaactccctgaaggacctactccacccattagtcaccccttgagttacaagatgttcccatgaacctcccttcaggccccacaacaggctatccacaaccttcttcatcaggacactccgctcttcaccaggagccaagctggacctaacaaggacagatgtttacatctgtgcttgaagcatgccggaatataatatgcccctttggcgtgcagataattttaaaattattttaaactaaaggtcactaagaacaagccatcctgaaatagtgacttaggcaaacacaggaaaaagtttattaacctgggactcacttggtttgggttatacacacctgtcccctcaattatacacttgacagcctagctccttcacctaaacacaccaatacccatctacacccctctccaaaaaaaaatgcactgaccatacatgcctctctgaacaatgggataagtttctcctcttagggtaatcaagctactactcaaatatattctcaatatatctaaattatgagggatagaaaggcttccaactgatcttgaatccaagagtctggctccaccagaccctgagcactggtgacgataagactgagcttttcctttgttatgaattttttttgtttttttttgtttgtttgtttgtttgtttgtttttcaaaacagtgtttctctctgtagctttggagcctatcctggcactcgctctggagaccaggctggcctcgaactcccagagatccacctgcctctgccacacactaagatgaatgcatacaaaaccaggcatggtgtactttgtaggcatcccccatctcttgttatttgtttgtttgtgagatagtctctctaacacagtgctgggattaaaggcgagcgcctccaatgcgattagcatttgtgaaaggtatctcagcatccctcttaaggcatggcactagggaccattgcaacttaaatctgcatagcagaccttcctaaacagtactgctcaccatgcttttcctcacccattgctggcttccccaggcccttagtttagtgcaggacactttagaaacccacatttctaaccacatttttgcattccatctaggtattcccgtgtgttccagtgagctactgatgttaataaccagtttgtcattgctggcttacacagctccaactggagaacctaaaaccaagggaagaaaagttgttcctcctatagttgtcctcagccttggctgtccccagcttccctttattaacatgaagactatcaagcctccatgcccacatgtggttgaactgttcgtcctcttattaagtatttaaatccccaccagggagatggctcagcagataaaggcactggctaccaaggctgcattcaaaccccaggatccacactgtcccctgactactaaaagcaaactatagtgcacacacacacacacacacacacacacacacacacacacacacacacacacacccctctcacacacacacaccaaagcaacagaatttttatttcatatttttataaaagtaagatgaagtctctaaatcctacgggactgaattctgaaacacgcagaagagacctgtgtgctcttccagaggtcgtttatgtagagatcatgggccaccatggtttatttgctctttgcacaagctggccacagagtgacctttggagttgactccctgggatctgttggtgtaaagctctgaccagagagtactgaattacatcacaggccaacagcagccaagacaccttatgtggagatgagatagggtacagaggggaaattgaggggacacaggaaggggcccttcactctagagttttgttgaggcctctctagctgagaatcaagaatcctggtacaattaacaaaatttgctgtgaagagacaatatcccttttatgtaaagtttttttttttaataggaaagagaaaataggaaagaaccatgctttgacctaagagtgtatgtccttactcctttcccacatgtaaacagcgattttctgggagtcccataagtaagtctgtaaaaatatcttaattgccttatgcatcccttggaaccttgattttagcttattagctataatcttatccaacacagctaagggaccactctgtaatcttcttataagactcagggtcccagattgtgacccaataagtcaggttcagctacctgatctagataaactgattaaaagagccaaaatagtactgaaaagcaaaaaaggaaaaattatttgatatgatcatattgggaaggaagacaaagggacccaatgattcccacaagtccaccttcagggtcctaacctgagagtaaggtttaaatagaaggtaagagatacctgtgactaaacagtccaaccatggtgtgggcacacccatcattgtctcagtcccaactctttcttgcatgatcatctgacaagttgtaaatccccaagagactacttcctcctctgcctgccctccagtgtgttcttcttccagttagtggatctattatttgaatagtttgacagacagagaaaggggcacacttgtttaaaaatccgaggtgcaaagagtgagagaccttggaacactctgtcctaaatgctatgtcttcattaaactcctcctctcaaggctcagaaaactgtatggaagaagaggtagagtcagaggggacggatgaatcgaggaaacggtgtcttccagacataacaggagtgatgcagacactgtggaagcatcacagggcctacacaggtccaagccagatggggtcccagcactgagaagggaactggacaccaactcccatccttaaccaagaagctatctccaactgagatgcactcacaccggaaaaatccatttcttccagggagtctcaatgggtaagcaaaccacattgatgtgcaggctccatgcccggcagtagatggccaacgtaagatgaactcaaaggtatttttggaggtttttttttttgcgtgtgtgtgtgtgtgtgtgtgtgtgtgtgtgtgtgtgtgtgtgtgtgtgtgtgtgttgtgtgtgtgtgtgtgtgtgtgtgtgtgtgtgtggtgtgtgtgtgttgggtgtgtgtgtgtgtgggtgtgtgtgtgtgtgttgtgtgtgtgtgtgtgtgtgtgtgtgtgtgtgtgtgtgtgtggtgttagggtgtgtgtgtgtgtgtgtctcatattacttcgttgggtattttttatttcactgggttttttttttttgctgacacattatggtttccaattttgtgtttttataggttatgtgtgcatgtgtgtgtgtttctcaggctccttcttcctttattcactttctttcattcttatttatttgttttatttgcctggtagttttcttaagacagcaatagttggaagggtggagaggtggggaggatctgggaggatgagggaggagactccgtcatcagaatgtaatatataaaactatttttaacaaaacatatgtttaaaaatgtatttttgtcagacagtggtggcacactcctttaatcccagcacttgagaggcagagacaggtgactctctgtgagttcaaagccagcctggtctacagagctagttccaggacagctagggctacacagagaaaccctgtcttgaaacacaaatattttgtgtgtatgtgcgtgacgtatgtgtctgagtatatgtatggatgtataccacctgagtgcaggagctcacagtggtctggagagatgccagatccctggaactggagttgcagatggttgtgagctaccgtgcaggtgctggggactgaacctagatgttctccaagagcagtaagtgctctcaaccaatgaactatcctcaaaccatgtttcttcagaatatcttatttcttccaggaagactggttattttacaaaaaaagaaagggagaatgttccttagcaaatgtttgatgtttcactttttttctttaattacatttatttatgtgtttgtatgtgtgaagcttcaattctttttttaatgtgatttatgtatatgaatgctttgcctatgtgtgtatatgtctgtgctccatgtccatgaccaatgcctgggtcctgtggaacctaagttgcagatggttatgagtccaatctgggttctccagaaagcagcaagtggtttttactgctgagccatctctccaactgtagaagctggggctcttgactctgctacagaaaagaatttcaggaagagccaggaagttattgattgagaagggattttaaaatagcttaagcatgtaggttaaatgaaaaagaggcacttagggaaatgatagcacttacccaagtgtgggcaggggcttctcaaaagaaaacctagctttaaaagtctttgtaataaaccagtggtggtgagcatgccttagatcccagcactcgggaggcagaggcagggggaatctctgtgagtttgacgccagccagagtaagttccagaacaacctccaaagctacaaagaaaccctgtcttaaaaacaaaacaaaacaaaaaagtctttgtgatagccatatatatgattttggtagcatctaaagttatatctcaaaatattggttaaaacaggaaatgatgtcctacacctgtaacccaagcactgggaaagctgaaacaggaggattactttgggttcaaagacaatactagagctatgtaatgagttccagaacagcctagaccacagagtgagactctgtctcaaaaaaaaaaaaaaaaacagaaacaacagactggggagatgagatgcctcatctggtaaatgtcttgccaccgagtctggtgacccaagtttgatcttgatgagaaccgaatcctgcaagttgtcctgtgacctccatgagcgtacacacacacacacacacacacacacacacacacacacacacacacacacaccatagatagatagatagatagatagatagatagatagatagatagatagatagatagatgcaagaaaaataatgaccatgtttcccaagggttgagctcagtgctcacaccactttgattttcaagttccattttttccagagctggacaattcaagcgttttcttgcctcgtctccagtatgaagtgtcattaggaggttcatggttgggagaactagtttatagtttatcccatcaaacattcttccataatctcgccacacttaattattttttttaatttgaaaatatttaggtttgtttttgcttcaggttcatttatttcacatgttttgtttgaatgttttgtttgcatgtatgtacaaaaacagcaaaagctcttaactgttgaggcttctctacagcccccctctccacttttcaacctactttatcactccattggctcaaatttgagactgcaattgaaaactgtgagaccaccacatggtggtggtgcacacctttaatcccagcattcaggaggcagaggcaggtactttcaaggccagcctggtctacaaaacaagttccaggacagccacctgactctgcctccttagtgctgggactcaagtgtgcaccaacacaccgtgctcaaaagaccattttaaacatacctctctctccatgccaaaagagatatccagactgagctgggatgtgtcttttctactcacagcgggcccagcctggaacattaatctttgtggcattcccagagctcagacatgcagcaaaattaacaaactggacctgttttcatgttggcttgttttttgttcaattcttaagtggggttagcactccgacttgttcttttacgcttttatggagggagtaaaacaagttgagttccggctaatacttaagtgcttatttatttagtgaaatgggtgaaagggggttttgctgctggcttctcctgatgctttaagtcctagggctcgtgccccgggcagaccgacagaaacgcaatcccagtttagataatacaagatgagtttggggagatttttacatcttgtttaatactgaaatgacaagccatcaaatcagtactacagctgcccttcaatgttaggtaataaagaagatattcattggggtttagaggtaagaaaaatgtccaagtgtgctaccctgtctccctgacatccatcatcttatacctgacatcactaccttgtctccctggcatccatcatcctatacctgacatcacttgggtttaccatagccccttgatcttaggaatgatctggcttttgccattctgcatcctgtggtacttttgacaagatttgaacccagcaaatgaccaaaaaggtcttgttctaattgcgtcatgttgagtcacccaagttaggaaagtgtgctggaagcaaatagaaatagcagcctgttcaaatatttggcattgtgaagcctaacacattggtagtacaagaaaaaataaagggtaatgaaaatgtttgtaactcaatggtattcttatattaacatatattaattatacacagtaacaggttcatgggacattttaatatgctgatataatgtattttgataatatccaccctcattactttctcttgtccccccacatacacactcaacgatctgcctcctctttccaactagtctgtcttccacgttcatgttttttcttttattgtttattttgtggctctgtttcattattattattattatgtgtgcatgtttatcaagggttggcacacatgtcacagctgcattcggagggcagaggacaactttatggcatcagttcttttccatccacctttgtgtgagttccagggattgaactcctcaccaggcttttacggccaggatctttacccactgagtcatcttgctgacccttcactcctctttctaaagatccactgggtttaattgggattgcttgaatgagcatgggtgagggaacatgggctagctacactactgaggaaattgtctccccctcccctcagcagacattagcggctgacaggtcttcagggaagaagagtaaggcctcaggagcctctcttgtctgtgatgtgatgtgatgtgtccaatcttgtgcaggtaattccagctcttgtgagtccccgggtgcaatggaagacggtggtccacaccattcctcctcttcctctgcctcttacattcattccgtcccctctttgacaatgttctcttggcgtagggcatccacagagaaggccattaggacaaagaggttaaaccaataggaagtcttgattagtgagccagcgactacactgggtgtttaggatcccagtgtagccccaagcttttctagggtgagcttttaagcatgaaaactataatctggggtgtcacacttcggttaacaagaacagttaaccagaagcagaactaaagaagccagaaagcaaggtgggcgtattgagagactttcccagaactatggactttgatggattaggtctttgttttcattttggcaggtgttgctgcttatgtgctgaatttaatggcttgaatggtacttccatcatggcatcagttgcactaaggtctgggggcctgtcacactctgagccttggagggagtgacatagctgtcccatttaaggctgaatattcagcactcatgttttcttatcattttgaccagctatgaagtctctgcagtaaccactgcccactgcatcaagagagagatcatatacagttagaagatatttattatttttttttgttttgttttgttttttgagatagggtttctctgtggctttggaggctgtcctggaactagctcttgtagaccaggctggtctcgaactcacagagatctgcctgcctctgcctcccgagtgctgggattaaaggcgtgcgccaccactgcccggcaagaagatatttagaaacatgatatgtactcaccaatatgtggattttagacatagagtaagggattaccatcctacaatccacactgccagagatactagtaaacaaagaagaccctaaaagagacaaactttgttccctggagaaggggaaagggtcaccatcccctgagcacattgagaacatggggagagggggtaggaagctacgagagtgagaagggaagaaaaggaaggatgcagaggtcatgagggagcaaaaaggttgagtcaggtgtagattagaagaaaggacatatgacaggtaggattttagttggggggtggtagaggaggaagggagggagacgggaactgggatcgtcatgcaattcaatcttgtttgtaattcaaatatatatataaaaaaagaaaagaatggggaaaagaagatatttagatgtacacaaacatttccatttaacaaaacagcaggactatctaaacttattgtattttacaaatgagggtcagaaatagagcaagcttaaacaattggctacaatgtgtactttcagaaaggggaagagagggaattcagcgactgagagctgagagacagagacaccctcactcaggctagagtgggaacactgtccatgtgatactgtttccattacaaaaaaaaaaaaaaaccaaaacactgtattttattataaaaagcttctttattcacaaataatactctggccaactgtggtagcacatacatataatttcagtgcatgggcggaatgaaggcagaaaaatcaggagttcaaagtcattatcaaacacatagtgacttttaggccaacctgagctacatgaaaccctgtccaaaaatctgaaataacatcaaaataagaacaaggttttgaggctaacctggtctacacagagagttccaggacatccagggctctacagagagaccctgcctcaaatttaattaattaattaattaattagttaaaataaaaacagtgcaaattcaacaacaacaaaaacacaagagaaaataaaggaatgatacaagaaagaaatcaaatttctttttttcccttttgtgtgcttgtgtgggtttatgtgtgcatgtgtaggtgtgtgtacacatgtaccattgcacacttgtagagatcagagaacagattgcaggagtcacttctcttctgttaccatgtggggtcctgggatcaaactggggttgacaggttggcagcaggagccttaccaccgagccacgtcactggccacaagtggaatcaccttcccactggctccacagatggaacgctgtggactggatgtgaaatgtcccacataggagtgtgtatttgaacagttggtttccagttggtggaagtctgtccctgtagaaagaggagcctcaatggagggcatgggttactaaaggtaagatttgaggatttctattttagcccatttcctgactgtactatgtttgccaaatgcagacgcagtgtcaccagctgcctcacccttcatgctttctccattatgatggactgtatcccctccaaccatacgccaaaacaaacacttcctcccttggttgctttccatcaggcgttgggtcacaccaacaagaaaagtaagtgacacagattgaggctgaaaataggaccatcgctgtggtaaagctgaccatgtggttcttaggcctctggaactggttgtgagaggactgtggaagagtttataacttcaggctgaaaacccttagaatgctaagggcagagctaaatgggctgttttggtgtttggaagcccaactgccaggattatggtaatgtaccaccatgcccaggtccatcactcctaatgtagaaaaaaaataagtccaacaattgttatttattatttcagataatatttagaccttacttgtatgatactccagatcactgggtttttaattatacttcaattaaaacacataacatcattgagtcccagtgaggcccctgcctcagtgtctcccaccccacccctattgctgaggttacagtcacacagccacagctagcttgtatgttagtgctgggaatctgaactcaggtcaccatgcttgcaaagtagtcccccttactcactgagccattccctaagcctttgcatgaacaaaaacttactgcaacttttatttactctcagaacactctttagtttgaattgttttttcagttgattttgattttattttgaagtttcttttggtttttttgtgtgtatgtttgtctgcatgtatgtatttgtaccacaggactttgtggtccccaaggaagccaaaagaggacaccggatccctgttgctgaggcgggctttgagaatttaaagaatgggccactcccagtgtgcattctttgcttcctgtttatcattcaggatgggagccctcagtctctattccaacagccttgcttgctgtttccctgatgtaagggaccgttatctctctggaagtgtaagtcaataaatccatttcccaagatgcttctggtcatggtgtttttcacagcaatagaaaagtaatttgtagcatgaattctaattggtattaataataaaaacccagagtcagatataggggttaatgttggagatcagagaagcaaagcggccagccactacaaagttctcacctcaaccaacgctcagacggaaggggtgatcctgtcctcagattgcatcctctccaccaaacctcagactgcactgagctcctgtctccttccaccttatattcctctctagagttgagattaaaggcgtgggatcccaagcgctgacgccacctttgtgtgagctctgtttctctttcagactggttcaatttcatgtagttcagggtggccttgaactaacagagatccatctgcctctgtctcctgagtgctgggattaaaggtgtgtgccaccactgcctggcctctgtggctaactaatgtggctagttttgcactctgatcttcaggcaagttttatctgttagatcatcagcagaatatcaccacggtagctagtacaatacttgtgggagagtatgcctgcagactacaactttgttgctgcgcaagcgcgcgtgcacgtgagcgtgcgcgcctttaatctcagcagttgcccatcatctgccacctacgagtgattctgttccgggttcagctccttgtatagtcacagtttggggggtttgttgttttgttttgttttttcttaacctgtagttagctgatcctaacttcctcttggggaaggcctgagccattggtgggttagtcaagtttatagttttgccaccaaacatggaagtatgagatgcttccaaaaatgctctgaattctagatacaatccccactttggtttttcgggacggggtttctctgcatagccctggcagtcctggaactcgctctgtagaccagtctggccgtgaacgctgccttctgaatgctgggattaaaggtgtgtgcgtgccacgggcacagcttgatacacccctttctgtccctactgcagaggggtaaagccacttcccattgacaagcagcatgaattgtccaaccggtacaaatgatcttctctgtttattgagccagtggcacaaagagctacaaacatcctcatggctatcttaacgtccagttcaacagaatcagtgttcctcctagaggaagatgcctaaaatgacagtcaaggtgtaggcctttaatcctagcacttgagaggcagaggtaggaggatttctgtgagttcaaggctagcctggtctatgcagtgagttccaggactacatagagaccctttataaaaaaataaataaacagctaaatggataaatgaaaattatagtggtaaaattttgaaatgagtctagcctcatattactcatcccatatttaattgcatggcctttttaaattgaaaaatgttactatattcttatttatttattggtgcatatgtgtatgtgcacacgagtatacacatgtgtatgtggaggtcagaagactacttgtggaagtcggttcttgctttccaccatgtgagtcctaaggattgaagtcagctggtcggcttggtggtaagcatccttacccgctcagccttctcatcaccccttcttccatgttttttgaactaggttctcactctatgttccagactgacttggaactcacagagacccacctgcctctgtttcccagtgctgggattaaaactgtggaaccttcttttttaaattgaaatctattcttttaagtccatactaaatgcacgtgtgtgtgtgtgtgtgtgtgtgtgtgtgtgtgtgtgtgtgtgtatgtatgtaaaatgggtttttcaattaccaagatggatcatccagtaaaggcactggctgtgcaaccctgacaactcaaggtccaaccctggaagatcaaagcagcgatttgtctccagaaggttatacacacacaaaaaaatagtctttttgaggcagggcatcatcactatgtagccccagttaacttgagttaaattcactgtggagaccaggggtggcctggaactcatagaggtccccctgcctttgcctcctgagtgttgggactaaatgatgacagcaggaggtagaaaatggctactcaagagtaaaaagattccaaggaaaagcagccagtttatttctctaagctaaaaccagaaatatctttgggcctctaagtagattgtctttccagaggccaacaatgcagaatatatttggggactctggacccttacctgatttctaaatgacttcagggtggaaggttagagtagaaaaaatcctggtccaaggaatggaatctctggcctgggtggagacctaacattccagtcggttcactttggctaaggaccacctctgggaaggtgtagttaccttaagccatgctaaagagataagcgaataattggcccttttagctttctttcacatcctgggcttccttacacactctctctaaaactttctcccaagtggctgcttgtcagtcctgtgtctgatctccacaccatctttttcctcttttctccatcctcctccaggcagctgctgaggttttataacttgcctgacctgaggtttaaactctaataatactgcctttgtgcttccatttgactccattcttgtatttttgcttgtgagcttagcctagggctgctgagccatctctgcagccctagattccattcttaaattcttttatcaatgacactaagaaccccaaggggaacctaatttccttcacatgaagatacgtgccaccacaacaggcaattttaaagtttatttttattttatgtgtataggtgtttgcctgcatgtatgtctgtgtaccatgtgcaagcctggtgctgtgtgaggccagaaaagggcaccagatcctctgtaactggagttatagatgattgtgagtgctaagaatcaaacctgggtcctctggaagagcagccagtgttttagctcctaagccatatctccagcccccagtttaaaaaaaaaataaatgtgctcatgtcaggacatatactaaaatttggaaggtacagaggttagcatagtctctgtgcaaggatgatacacaaattcatgaagcatttcatagcttggtacctaagagtactctgacatcataaggtctatgaatgttgtcctataccatcacctagacgtcagctgatacatctctgctgctgtcatttcacaaaaattaattaactgataaaaaaaagcatgcctagacttttcttattgcaaggatgaatacaatgaccccatgacccttatgaaaaggaattaaatccgtaaaccctggtctccattagtaagctgtctttcatagctcactgtggactgtggtctgtttctgtggatcttcggggctttgtatcatcatagaaccaggtaacgtaatccacccagagtctagatagtcttgtttctttggtaagtagccacaggctgtggtgaagaacaggagcaaggtcctgagaggctcccatgaactgggtcatagttcaaatggggtctctttatcagcagcttttcaagttttagtttatcagatcaagtaaaacgttagtgggctgtacaaccctatagaccatctgggccactgcctgttaggctgacgttccccacctttctggtggccagcgctgccatggcttctaccactctgggattgggttattactagtgtaacacaggagcctgtttcatcagtgccatcttacactatcagtgcacctgcaggggacagcaaacacctcacttccgataccgccggtgttcctcttacccaaagctgtggtgaaaggcctgtcctctgtaagattgatctcatgctctttcctcatcaaagcttaggatcctcccttctcaacttcaccaatgatcatgtatgttaccccaatttacaggagagattattgtgttggctttcatcaaccaacttagcagaccgagggccactccaacttgagcttaggtattgccttttttttttttttttttttttccttttcttgttgcttcgaagaagtgttctgatagaaaaaactcagggcaggagaaagggtttcttcagctcatagttccaggttaaaacgcaccatgggtgggaaagttaaggcatcaaagcttgaagcagctggtcacattatgtctacagtcagaaaagagcatggtgttctcacttgctccattttacacggtccaggataccagtcctagagatgggagccactcatggtagaaggatctttccacctcagttaatcaagataccccacaaacaagcatgcctagtgattctagattcagttaagttgattattaatactaaccatcacataactgaatgcataatctctggtgctgaaaacacatcagcaattattattacatcaattttcacttgctctggagttcaatgtcaagcagaattcctgtcatgataatgcatatgagaaacatcttctgattcattcctcgtagaagcttgtcatctggcatcaagtgtcttatcttcctggagcatgctaagacctgactttcgctcaaggtctggaagctaaatgatgttgataggttcttgcagggctaatgtctttatggtgaacttgatataggaccttcaaagaaggtatggccaatctgctaacaaaggagaaactagttcagcaagccagggaggctcaaggaaaaaaaaattaggttaggtgtaaggcaaggcctcgtacaggctagtctgtgcacaaacccccaagtatccaaggatgactttgaactcctgagcctcttgtcttcatctccctagtactgaagaatttgctgttcagaataatcacatatatcccaaactactaaaatgccctcattccaatgttcagatagaagatcaaataaagtcacaaagtcagcttgcatgggaatttggcaatccataggatcaaatgctgggaccaaatgatttgttagtttcttcctatagcaacaggaatgaagaaattccttctgagcactgaagtctctagttttctgacccgtcattttagtctgcaaactcttcaggggtcttagccctccctacaggtctttccatcggaaaggcctaactaacttagcaactatctggtctaccaaagacctgcccgtaacaggcacttcagtcaccactgatagtttgggaagactgtttcttatgtcttccctaagacccgtcgttttctcttttccccgtgactgtaaaatcatcatcaagtttatgtataaagtcccaggtttctgtctttggcagtaagtatcctgaagatgctttcacttcagcatctgttaagttttatccagggaaacaaaatatattcaatataccaacagcatactcaactatttcaagtaaaggaagatttaattcaggaatgggtgcatatcaaaccattgtagagggaaggaacagggaaggggaatggagggagggggagatccatttacccaataaagataggtgctgggatacagctcactactagaatccttgctagcaggttggaggcccagggtttgattcccccatcatattgtatctcaaagtgtgtgtgtggcggggggcaagagagatgcctcagtggttgagagactcccggctcttatagactatctgagcacccacatggcagtccacaaccgcctgcaactctgcttgcaggggatccgatgcctacttgtgacttctgaaagcattagcatatgatgcgtacacatacaaacatatgtgcgtttgagagcgcacgcatgtgtgcgcacgcacatgcacacacacaaacacaaacacatgaataaaaataaaatacatcttcatgaaaaaaaagattaaagcgagtcagtaagaggttttagaggctgtgttctttgcccagaatttgataacagttaaagaaccttcatttgcacataatggttctcatgacatgtgacactaaaaccagtgagtggggagcaactaactattggagtcttccttctgtctcagtggattggtccaggaacttcacgaattttagggctgcccacactgtccgtaccacaacgggccctacacgctgccagcgggcccacgcagcatcctgaatcccacatcagcatcccgaaccccatgtaagaagtgagattggggacctcaggttccctgatatcagacaaggggactccacccagttgctgaagagcagagagaagtaggaggaggcgggagaagaggaggagagagaaagggaggggcctgcctcgcccccactccccgaaatccactctcattggctaaaggctccctggccccatcctactgcccgccttcgggcgacgcttaaagtgtgcggagcaggtgtctccagtggaggacgaactttgccagagttagtgcagtacgctgcacccattcattgcctgcaagcgtctatccttcggtccggcccgcagtcgtcgggaagggaacccagggactgcagcggtcactgggtccagaggagggccggagagcaccgctgaccctcgtgggctagggaggtgacggcggctgcgtccatgcagctgtgtgccagtgcatgggggctgcgcctgggccgcggcgtcgggagcggccaccgcctggctcggggcgcgggcttgagttgggcgccgcagcgccggaacagcagcaacggcggcggtggcggggaccgcggcgcggctggggcctcgcgcctcctggagcgcctcctgcccagacacgatgacttcgctcggagacacatcggcccgggagacaaagaccggagggagatgctgcaggcgctggggctggcggtaaggccctccaccttccaccttgctggggctcagcccgcagggcctccggactcccaccttgcttcctcttgcgtcccgggccccagtttggaagcgagctcgcttattagtcttggtgcctcctcctatcttaacttttctgctgttcccgctcttcaaaagtgtattttaaaaatgtccccaactccaaacgaaccccaattttgcaggaaaaggaagaagaaccccttcttagagtgcatcaatccggtcagcttcagttgcagactaaaatcgaacccggagtggcggatttaccacccggttccatcatttttttttttttccttccaaaagatttctgttgcctgaagttccccttttaaaagaaatcccaattagacgatttagatgagattcctaccaccctttgatgatgaaaaacacaggggtggctctcttaattcaggcattataactctgcttgtcgtgctcaccaatttgcgtttgttttgttgttgttgttttgtaaaattttagagcattgatgaactcatcgagaagacggtccccgccagcatccgcttgaaaagacccttgaaaatggaagaccctgtctgtaagtggccgggaggacctcctggggctctgcttgttccgccttatttgcctcatataatccctaatggtccgctttgaggtaggattggtcaggactgaaaacatgcagtacttaagagccctaaaactgggattttacttcccgggaagaattcatgcatctcctttcgtggtctgcatccctggcctgcggaggcaggtacctacaagcttctgcaaggaaggccatgccaaacacgtgtggctgactctctgctgcattcacccccacctgaaggactttgaggtcctttgagctgggaatgtcattatctctatagatcaggtgagactcagaaaggacaaaggaatcacctaggcggtgcattcattcggaaggagatttaagacttctcaaagttctttgcttttctttacaaagtttcaaactgttctgtcttgcacccaccccaccacacacacacacacacacacacacacacacacacacacacacacacacacacacctactgaaaggcagtagtgctttgcagactccgaatgatttttctagaagagcacacaaatatggtttatgcttgattaagaaatctcaggcaatttatagaccttcctgttttaattttaaaaaattttgcctgcatttatctgtgtgcaccacgtggggtgttgggtcttttataaacggaagtacagaggtatagttgtgttgcgttatgtgggtgctggggccacacctgagtcctctgcaagagccgcaggtgctcttaactgctgagccatccctccagcctcctcagtagaaatgtcttttaatgctctaaatattgtttggcgggtatttttatatggtattgacttctactagtgtggggaagaatctagacgccgagggcgtggtcagagttgaagaactctttaagaaaggttaaaaccaccaagctccttcacatggttatgcttaggatagaaatacttctcttttactaaggcaattgttttgttttgtttgtttgctgttgctgtttggtttggtttctgtgagagggaatatcagaagcaaacctgattttcttttaaaagatgatgctagcctgttctggctgcatctggggaatgctgtgcctcagttctacccttgtcgctgttggagtccaatagcagggagcttgctcacctgcctgagacccagaaatagccacaagctgcaactatctcaatttccggaaatcagaattctgagccatcaaatgtggaaaaagagaagaggttgccttgtttttgaaacaaagactttcttgcagcttaagctggtctcaaatttgtgacttcctggtctttactcttatgtgtactacaatgtggaacaactgtatttatttgtttgtttctgagcaagcagttctgtgggtgtggtttgtttctgtgtttctttttcttttttcttttcttttttttttgggggggggggtctcaagacagagttactctagctttggaggctgtcctggaactcactctgtagaccaggctagccttgaactcacagagatccgcctgccgttggtcccccccccccccaggattaaaagcacacactaccaccgcccagcctgtgtgtttcttttttaaagttagggcctcactgtgttgcccttgctggtctagctatgtagatcagctgggattaaaggagtgtaccaccatgtccgaccctagttgtatagtttgaaaggaagccattggtggatatttgtgcaaataaataccttctgagactttaaaatacaatatgctctaaagtaagatgtccttttcagagtgttaaagcctggaaaattagtcattattgtctctttttcttttctttttttttttttgctttttttttttttttttttgagatagggtctcccttcctatctctgtagctggcctggaatttactttgtaaaccagtcttatctcaaatgcagagatccacctacctttgcctcttgagcgctgggagtactaggcttaaaaagatgaacttgttttgttgttgttcagttcaggtgactaatttttccatcaagcctactccccctaacccccccccccaacccttgaaacaggttcccaagacattgcaacttgagtatagaacttaaacctagtagcttctgaaagattttaggtgggtctgtctgcttagtctgaagtgacttggagaaaatattgtagagtcaagattcccaccgccccttttcttcaaagcttactttggaataaggaacaataatgtgagggttagagctgctgaattcacaagacttgggtgttttactctgctctgtcatgcctaatgaagagtttctgttgaggaaagccagttgattcttgctgtctccagtgggagcagtttggagtgaggcagctttattcaaaccttgcttcctatgagtgctgatgcttttgtatacttgggaggaattgtgcagcaaggattggtcagccatggtggctgtaggagcaggttgctgtctttaagagcctcattgtaagcagtgagataccaccggggttaattcttaagcgtaactggctaatcttaaacatttataaagtgcttcccatgagcacttttgaaaagtgacctctgtgtgttacttattcagtcctcatcatgaccccgcaaactaagctggtctttctcactctctgtcctctcttttggagacaagagtctcaactgtgttgcccaggctggtcacaaatttatggactcaagtggttctcttatcttcccttcccaggtatctaggactagaatccctcaccatcatgcacagtcagtatcccctttaaaagggaagaaaccaaggtgtgcagaggccctttaacttgtccaggttctagctagtgacctcgagatgggagcaggatgcaaactcaggccatctgtctccaccctcaacattctccacattcacacatctgtcttcatggtgtcccaggaaaagcaggaactcttaccctgactcttctatggtacacaaagctaagtcacattgcagtcacccttgccatgtgcaatcttccccagctaaacgagacatcacgatgagggctagggcacaagtatgggagctctcagttctacaattagggtgaagaagtgtagttagcattgcgggccagtgcttgcatggatgggaagcaaccccttggtaacaagcctggaggatgatcctgtaggcagaggggccagctagtaatggacaaagcataaagggtcccagcagtctggaaagagaactttcctctcagacacttcagaaagtgccttgaaaaatacctttatctgttagtctctcagtaagacattattcaaagaagcaagcaatgccactcagttcaaaatcctgttagcttagttcctctcaggtgaattcccctcccccccaagccaccaccttgcacccaaataataaataaattagtttaagaagtatattttagtgggaacattggtgtctcttaaatggtgcaagctgtcttttaattatcttgtattcctgcagtagtatctagtaatgttataattaattaaaaagtacgccagaaaccaagcggatgacttttagtcatgctctgttttgctgtgtaatatttccagtcaagtcatctcagagaagccagattaaactagcccaaactaaccggacaaacagcatagagattaaagtttacacaaaatctcacacttcttttcctgggcatgctttgggagagagaggagaagcaaaccctctaacttcaacttattccacgggagctgagctgtcagaatgagagttctgatgggcttgtgagaactgagtgtcctaagatgtgtcgccagaatgaatttttaaataaatgtttaatggagtgcagtgatcaagggagggacattatgcaatgtggataaaagtgatgactttatcaccccggagggttatgtagtccctgagctgagctgagcacttagaatgggcagctatccttcccaaatcagtcttgcctatggggtcctcagtctatcctgaggctctcttggctatttctggcttctccctttcccaacatatacctcatttataactagaatcattgaaattttttcatctaataaatatctggggctataaagagtaaatgacaaagtcaaggttatttattctgaacttatggcaagaattagacttgaagctgggcattggtggcacatgcctttaatcccagcactcgggagatagaggcagttggatctctgtgagttcgagaccagcctggtctacagaactagttccaggacctccaaagccacagagaaaccctatctcaaaaaacaaacaaaaaaacaaaaaaacaacaacaaagaattagacttgaattttggggaattaaaaaaaaacgtttatagtgtgggggtgagtgggttttgagaatgttccaataggaggctgttggcttccaggacactatagaagggttaatgagaggtgtagtgataagacacagcttcagaagagatgtggtatatatggcttcctctgattgtccctgagctggaggtggtctttgcaatgctaagagtcaaacccagagcccctggactgctaagcatcccagaaattccagtctttatgaagtttatttttagtattgaacttttcttgtgttttgatatataaaaccatgctaaccacactgttggaagaaatacctaaatatttcttttccaaaaaaagaaattatgtgtggggttgggggtggggtgtggtcgtgagtgtagatgcccttggagtatgaagaggggtgttagactccctggaactagagtaagcaatggttttgagctgcttgacctaggtactaggaatgtctaagccatctctctagcctccatcctcttaaagagacatggaacccaaccagaatcaacaaagatggatctaatttttttttttttaatttatgggttggtgaggtggcttagtgtgtaagtctgagcaatccccaggacctcgaggtagaaggagaaagtgaactgcacagattgttctctgacatgactttctcatcttctctgagcacacacaaagtgcaaactagtcttttaatgatcatattttacaggagtaacattcctaacattgtttttaagtgaactgttctagaaaaactatgggtgatccattgctacttagaaagattgctcagtgggaaagaaacaggatttgggtcccagcacccacatggcagcttacaaccacctggagctcggttcccagggacttatggtgtgggcagaggtgaaagtgtaaaaacacatggctgtttgaggactggtggatccgctgtacctcactagcggtcgggaagattgtaaacaaggagtgagttaccgctctgcaggattcagagccaaaaagttcatgtggcatatgttagatatgagatggttcagttctccccagaaacagacaccgagatgatgtaagtatacaagaagggggaagcagagatggcaggagccctcaggctgctgcatgtccgaccctggtggaatgaacagaggtgacaggacactgagcaaagagactcttagatggctgtacaaatctggaagaggtaggcgttgaaaagcagagagagctcaagagaaagatgtgaggtgacgtcatagacttaagagagtctgcagtgacttcatgggaataagtgatttccccgatggaacgaggagaagaaaggcttgatgtgccaacgtagataaagcatgcagaggggggcagaacagtcaggcagtgtcaccagggtcaggaagacaattctccacaagacctgcggcccctgtgttgcatactgggcctctcttatgtccaagaaggaagaatgtgcacagaatcaagaatgcccccctagtgtggtagagtttgggagctgcctgcttggggttctcttcgcatggtaagcaggaagaaaaagactgaatgaggcaaaagtggagtttcaaaagcatcagcatgtctgtctgggtggtaaaaatggaggtcacccctcacagagagcatgatgaggtcaaatggcattgattctgccaggcatcatttagtaatcccggagcaagaaccaagcattgagtacaaatgaggttgaggactggcatcctcaagtgccaagtacttcaaggtctatcagtcagctcgggtcactgggttcagagagagatggaaaggctcatctcatctgccttgcacctagagtttcaatgatcaacttcatgaaacgggtccaggacaggaagagcgcactgattctcaatcagaggctctgggacaagtgctagatcccaaggttatgccccgctctcagtatctgccttctgattttgtgtgtctttggtaaaccacctgcccagtagctccatgccttgctttatatatgttctatgaccgatgaagacttacatctcttttaagatttatctaaagttatggccaggcatagtggctcatgcctttaataatcccagcacttgggaggcagaggcaggtggatctcagtgagtttgaggccagcatagtctgcacagtgtcccccccccacccccccccgcaaaaaaaaaaaacaccaacaaaagaaaatattggggggttttttttggtttgtttgtttttaatttatgtgcatgtgtgtttgtgtgtgcacttagaggtcaaaagaaggcgctggattcctggagctgcccagtgtgggtgctggaagttgctctctcattctctgcaagagcaggaaagccctcaaagccactgagccctctctagccccttagatctcattgtcactgctcaggcctgtttctcttattaatccctggatatttttataatataaactgagagttttagtaaggattccccatgctgattaaactatgatgaaacctctgaaaatctaaaattattagaggcaatgataggaactttgccaatagtgtcaagtttccatttatgaatgtttttcaaaagcttttactgggaggaatattgttgaaccacacatgaagacagttttcatagcagcctactctggattctgtaataggtaagttattaggtgtgctgaactacctgtatgggaggccttaggtgattttcattgaagcataccattcatgttcctgcctgcaaagagattacagttcattacttagtgagattataaattaagccagatctccgcattgaccgttcctttgatctgtaaaaagttgtcatttgcctttccctcaggcagagtaagttgttcgagttgagctcttagaacatacacttccccttgtgctcttgctctgcaggccataacagtgtgcccaggaggcagaaaagagggaaaataaaccctccccagattctcatgtcaatctggccatctggcctgactatgaatacataggtcatctggtgttctagataaatattatgagttgcaatgtttctctgtttgcttaaaaagaaagaaagaaagaaagctaaatagagacgccatgttggagggctctctgagaaaggagagatttgagtttgaggaggaaaataacagacatgatgtcccttcatcttctctccaccactgtggctgctgttctgttgatcttgaagccctgtgtctttcagctgagcagggcccactgcaaaggactctggcatttgcagatgtgaaggaaggagccatcagacactcagagacacgagaggtggtgatggtgtgaggagtcaggtggttgctaatggaagagtctgaccagtggaggatgagggaaggaggagtagggtaaggggaggttaacctgtgtgttgctcctgttacctggccacatagtaaaaaccatgtgatttttttcatattaattgtcaatctgacatcgtctaagctcatctgggaaaggaatgtctaagggggaagaataggttggcctgtgggcacatttggggcagagatcaccttgattacattaacaggaaccatgattggaggcaccattccctaggcagggggtcctgtgttgtttaaaagtgggaatgatgatcagagcaatgaggctttcctttaacagctctcagttcttgactgttgacttgagaagagcgaatgcctcaagcctctgctgccttgacttccccacagtgactgcgactgaaattgtgggccaaatgtactcattctcccttaaggctgcctgtaaaatgttgggtattttttatccatgtaacaagaattatctaagggccttccatttgagttcccattctacagaggccagagaatctggtgtggtttggcttcctgtaatgaaaaaattctgtgattgaacagactttgatcatgaaaccctccactgcccagggaggaaacttgacaccaacacatacatggacaggtgtggcagggggtggcttaagccatgtggttatgggtaagataaaaagggtgatataaatgtctggatgcgatgaaaacagggctaagtttttaaacattctgacctttcctcagaaaatcataatacacaatatcactcaggaaacttattgcatttatacctgcccctctcccccatggttcccacatggatatgcatgctttggaaccagggatatgcatgctggcaagaaaaatctgccaaggcaatccccaccctcacagtctgtctccagctttcctcttcaaccggtggcaaagaaagacctttctgaaactggtgacattgtctggggaaactcaaatatgagtgtgctggttgtcagcactgatgattcccttggagcctttcttagtgtcttgtcgcgtgtaggagggtgacaatgggagggagacttgacactgcttgctgtctgctctattaagaagctgctggctgggctgcctgggaaacagtgtcactcatggagcttcgacatcggtctacttcacaaagactactgcgttgcaggagtgatgtcaccacttaatctttatcataaaccatatacgctcattgtccagaactcagaagcacaatatttttcaagggaaatttaccaactttctgtgaatcatccccaagatgctccactcagttcaagcacgaatatgtttatcttctgttgttattatgtactttgtgtgtatgtaggaatatgtgtggagttctgaggacaatttgcaggggtggatgggacttggttctctccttccaccatgggggtcccagggattgaactcaagcaggctatcaggcttcgcagcaagcacctttactggctgagccatcctaccagccctattgttttgtttcctggagactctagttagttagttcaggttggccttgaaatcagggcagtcttcctggctcagcttcttaagtgctggggattaccgctcgtatctattagttctttaagaatatgaatgatgctgggcgttggtagagcactcctttaatcccagcatttgggaggcagaggcaggcagatctctgtgagttcaaggccagcctggtctccagagcgagtgccaggataggctccaaagctacacagagaaaccctgtctcaaaaaaccaaaaaagaaaaaagaatatgaatgattaaaaaaaaaaaagtttagacattctcagggtagaatgcttgcttatcatgaacaaggacattaagtttaatcccttatacgacacacagacacatacacacacacacacacacacagagagagagagagagagagagagagagagagagagagagagagcacataagcacataatcatgatctaagcagtgtataggaccacaggaatgccatctttagatgacagggacaaagccaagcatgaatatatcttcctatataattaagaccaaaaaaaaaaaaaaataggttttgtcatgagttacacagagagcatgtgttcaagtgggcatatgcttagacaacagcacaccatcttgactcactttcagagaatttctttttttgttgtttttgttttgtttctttgagacagggtttccctgtggctttggaggctatcctggaactagctcttgtagaccaggctggtctcgaactcacagagatccgcctgcctttgcctctgagtactgggattaaaggcgtgcaccaccaccgcccagccaagaagagagtgcttacctgacctggaattgaaccccaggcctcaggggtgtgagggccgaatcttaaccactagaccaccagggagcagcatttcttgtacagagacatttatctgaaaaatctcaacagccatagcaatgggctaagtgtataagacctatgctgttataaaatgtttctttgaatcaggtgtgatggcacacaccttaatcgcagcactagaagacacaagcaagcagatctccaaatttgaggtcagccaggtctatttatcaagggttccttccaggtcagccagagctccgttgtgagaccctctctcaaaatgaaaagaaaaaaattattttgtgcagagtcctggatattttgggcacacaaagtgaggaagctgctattaggaagtctttctcatttggaattacataaggaggaagaaggcgtactcagtgaattccaagaagacgctgcagtcccctcctggagcctctagaaagcagagccccaagggcgctgaactctgtcctctggccatcaggaccagggcattatgcaatgatctgaggcagaggcataaacaggttaggagcaggtatttgttccacaagagaaaaaaaaaaaaaaaaaaaaccctgctgcttggatctgagaaagattgcttaagctcctgcgcagttgggggtgcactgcacacagtccagcaatcctgcagggctgaaggctaatgaaaacgacagcttgtctccaagtggtggttctttttttttttttttttttttttttttgttcccgtgagacaggatctcactgtgcagctcagtctggcctctgactcactatgtagcccaaactggacttgaactcatggcaatcctcctgtctcagtctctgaagtgctaggattaatggcatgaagtacagtgcctgacctcctcatggcttttaatggatgtcgccttcctcattctgtctcacttctctcttagttattttaattgttccccactcaagaatcagtgcctaggaattcctgtgcctaggaacatggtctttgtgttaagttgggaggaaaaactcgaggaaggtgcgtgcaccttcttgttctgggctctggtgtgagagcaagggaatctgttcttttccctctttcctttgtccatacagcttcctggggatgggcttcccagggatcgggtgccacaatctcttgtgtgtggtcttctcttactaggtataaggcaaaggctgccactttgggatcagagatgtcatattttctgtagaaagggaggcactttccaaggcacatgagaagtggcagtgacaggcactgtgttcttccagtggaaattagatttgattatggccccaaatttagtcctggagacatggttctgctcagttccatctctactggtccatagtcgacctctacatctctatgaattttcccctttctctcatcttcttcccttcttttgctgtgtgggcacacaagatgacagctaactctgggcttctaagtacattgggatgcctcttctgcagatatactcaagtgacatttttctgaatgggtatgagaaataacagtggtgaaacatttgaagctagtaatacactaagctctgtgttcggagaatggttttccttatgtgtgggtgaggaagcctgaggtcttcgatttttatcatagcaatgtcctagcttctagttggggagttcagttatgatagcaatggatgactgaatgggaacagctcctcacagcagtcacactttcgggagcgtgaccaagaactgactgttttagtttaagtttccaattgccgtgatagttagtctaaccaaatcatttaaagggagaagggatttgtttggctcaaaattctaggttcccagtccatctttgtgcagaagtgaaggcagcatagcaggaatgtgaggaaacccagccacgctgaatcgaccatggagagcagagagtggtacattagtgcgtgcttcattaatgctccttcctggaggattcaagaatgtgtcaagttaccaataccctgtgctggggatagaacccagggcttgtgcattgctgtattactgagctacaacctcagccctttgctttttaatgacagcctctgccttcagagagctagcaatcacaaagccacagcatggctggcttacatactaactatggtacaggtgtctattatcttgatggacaggacataaaacactctattacctccctttgttttcaacagaaagtaaaagagtgcataaaagatccggctacactaagttcgcacaggaaagaaatcctatttacactacctgagtaggaacagaaccaacatgaacttggtaaatttggtttttcctgtaggtaggtgtgaggatacagaaggaagagagatgagaactagagactctggcaactggagttcagtattcccccattacatcatcaattattaaaggtttgattgtggctccttaactattctagtttagagtccagggtttctagaaatgtcagcatctcccttggtagtgttcaaactttcccacttgagatttttcacaatgtttatgtttgttttaatgatgatctcattatatagatagcccttgctgacctggaacttgctttgtagaccaagctgcccttgaacttacagagatccgcctgcctccgcctcccaaatgctgggattaaagatgtgcaccaccatcctcagcttaaaaagcatttttatgcttctgagtataattagtttgttcctcatttatgctgaattgcctttttaaaaaaatcacacaagccaggtggtggtggcacacgcctttaatccccctcacttgggagacagagacaggcggatctctgagtttgaggccagcctggcctacagagtgagtcccaggacaggctctaaatctacagagagaccctgcttgaaaaaccaaaaataaataaataaataaataaataaaataaaaaataaacattttatgggtttcttcacattaaggtttctgctcccttttttaaagtgtcttagttcctatgtcaagtgaaaagacagtcctagcatttatcccctgtaagattgtcactggatttagtcttacctggtcttgagagttgggtcttgttggactacttatagggagtgagataatagatgatatcttcctccagggttcctagactactctccttggggaagctggcccacctctcttactgatccttgggagggtcctccattgcagatctatagtagaaactgtctttcgtattattgggaatgaacacacacacacagcagacatcatcagaggactagaaaatgaaaccttatgaaaacgaaaataaagaatgaaagaataaaaagaaaattcctgctggcctgatggcagaaatccaacagcacagcggaacttcttctaccaggaagggcagtagctttctgttgaagaaaacagaccggaagtgactggcagtgactggccgtgtctactcttccaagggaagaggtcaataggttgatttggagctcctgtcctgcctctgacctgcttctgaatctttgaatttgagttttaaaagcacaattttgaggggcagcaagatggcctattagaaggatgcttgctgtgtaagcttggagacctgggtttgctcccaagaagccatgtagaggtagaaagggagggctgagtccttgaagatgtcctcaaacctccacacatgagttgtagcaggcatgcgcacacacacacacacacacacacacacacacacacacacacagagagagagagagagagagagagagagagagcacatttttcagataatgtgacttaatgagaaaggtgggtccataattgtggatcttggcacagtagctatttttctatctgtgaggctcatgtgtttccacagatcaccccttttccacatagtaaagagtcctctgtgctgaatgaattgtattggtagtctgagtaaatgtcaaaacctagaggttttcctgaagttgaaaccacacttgtcaaatttgaaacatttgttgcagttatttctgctctagttctttcaagactcaactgagaaaactaaaatatgaggggagggtttccccagttctttgatggttgtgtcaaaaactaattcatcaaaggggaaaaaaagccaagcagaatcacttgaccagcatcctgtgtgtgagtgaaggtgcttgcatgccatgcatggcacatgcgtgatggtcaaaggacgccttcccacagatcagttccatcctgctactgtggattctggggatcaaactcaagtctttagccttgcatgagaagcatttttacccagagtcaccttgtcaatcttatttctaagcaagtcaataacattatattagtctttgccaggcatggagccagccagaacagaactgcttatgccacccagttcagttatttgtggagtatgacttcaagattctcctgcctccccaggattagactgtgaagatgaaacagcaatgcccagagcagatctttttatttgtttatttgtcttgagacagggtctcctatgtggccttggttatcttgcaatttgttatgtagaccaggctggcctcaaactcagaggtcctcctacctctgcctccagagtgctgagattaaaggtatgtgctactatgctggactcagggcagggcagatcttgggactgagtaattgattagggcatttgccccagtctccttgaggtggtgtgggaaagcactacgcctctgcatttcttcatttttctcttcttttgataacagcgtttccctatgccacctaggttggcttcgaagcctccccaagtgtgtgctgcctggtttttagtttttaatacaattagaaacatagtaccagccatagatagtgtcagtagataaacatcttttaaactatttgggctggttactttgggtgatagaaacttcataatgtatggaaatttttttttgtctggagaagacctgaagaccagcctggcctgcagctgtggtttaagtgtccagtagggcccatctattccacagcttctctagaaaacatctgaggcgatgtctttattgttctgctaaggttgctgaaagtcaaactgcaatctggatggctcaagcaaaaggaatttgttctctcttaggctgagttcaaatgcaaggtgttgacaggttggttccgtgttggcactctgaggaaggatctcttccattcctctctagcttctagtcattgcttcgattccttggcttatccatgtatgaccatagtcctatgtaaaacagcattctctttgagtgaaaaatgtccagtgtgcccaagttgccatgttggatggaagatgaccctgatcagtaagaccttgttttaatttgattatgtctgtgaagtatccatttccaagcaaggttacattcaaagataccaagattatgattttgatgtattgttttaggagacacaattctattaacaatacatccatctccttcctggactgtggtgctaacttttacccatgtttctcagtggccagaatcttttccctgtgggctctccataccttatatagaatgatcttcccatgatacagtcgtattctccgtcgaatttaagggctaaactcttgatttggccagcaaatcctttcagactgccctcatttgagagccggacctttacccagatggcacaatgtgtggaacctgtccatctcgcacaggatcttaattgaagcagggttggcctgccaggcactgctaattaatctcctctcccactgggcttttgaatcaatcactctgcccctaagaagattgtttgggaagtgattggattttctgcattcaagaattttataattccttgctaactaggtccctctatgggaacaccagttgagagttcatgtgagtttttcattatgattgctattttatattttgggataccaactaggttttgttgttgttgtttttttttaatagcacttcaaatgacagagggaaatattcagttcagtagaacaattacaaacaaaatttaagccgtgtattatataagcccttgcctgcttccagagactgtaagacaacagaaaaagaaagaaagaaagaaagaaagaaagaaagaaagaaagaaagaaagaaagaaagaaagaaagaaagaaagaaatgggggaggggaagaaggagcaagagaggtgactccgtaattaggaaccctgacagctgctgcagaggaccggaagtatgattccatgcacccacaatgggcagcttgaaactgcctgcatctccagatccaggggtggtcaaacagcttcttccagattctgagggtacctttatacacatgcacgcatacatacatacacacgcaaatacaataaaatgataaagtttacaacagaagaacattactgtgagaagacgctttgtttagaggaaatagagcagaaattttaaaaaatgacagaagaaacatggaattaggcaactgttaaagaattgaataaagatggatggtgggacacacacctttaaactcagcactcgggaggcagaggtaggtggatctctctgccagcctagtctacaaagtgaattccatgacagccagagctacagagagagaccctgtctcagaaagcaaagcaaacaaagagttgaataaagaggctgtgggtgacggtccttgccttcaatcccagcgctgggtggtgggctgatggcctacatagttccaaaccagtgaagactgcatagtgagatgtctcagagagacagagacctgaatgaaggaggaggaagagagagaaccaaaagaagaagagttaagaagaattctgagggtctgggaatggctcagtgtgtaaagtgcttgccacagaatcatggtccctagcacccatataaaggctaagcatgacacaatgctgtggaggctgagacaggcagatccctggggcttgctggccaggaagttatcagaatctgtgagctctgggttcagtaagagacactatctcaaaagtaaactggaggatgattaaggaaagcatcagcctctggcttccattcgcacgggtaagcacgtgcacctacacacgtgtagacatataaatgtgcatatacacagatgaaaaatgatgagagactaaaattgagaaaccaagtgcccttgggggatcctcccaccagatttccatatacagtttagtgactgtattttctgtgtagctgtcggaacacccagactacatgagtgaggcttttcagctgtaagtggagctccctgctggggcattttctctagtaacctgtctctttttcccacaatcaggtgagaatgaaattctggaaactctgcatgccattgcaagcaaaaaccagatctggagatcgtatattggcatgggctattataactgctcagtgccccagaccattttgcggaacttactggagaattctggatggtaatgtattgcctcactagagaacaggactgctagactggtggtccctgtgtctcagaaatctcacactgatgcctgccccctgctgctctctaagctccaggaatctacctgccttctctagctaggaaattcattgcagggtgttgaccatagattcttttccttctcatttccataaagtccaaagccaatggtctcttctgtgacaatctgaatctctatgccacttttgaacaaggcttcattcctctttggtgacaccctggggctttttagactgtgtctgaacttagtcactcagtattgcagcctgggaaacaatcttgggcttttgtcttttgccagcgttttcaaaggacaatactcatgttcctcttctccctacatttcttggtccctatccaatagaaatgaagtgacatagtctcagaagaatggacacagtaacatcagctttattggcggcactttattgagaaagtgaacgtatgtctgtggacaggtctgctcttgtacggccaccttcttgttcccatctcaccttgccaatcagataattcatttccacccctgggagttctgtgtgtcggaagacgatcccaggagtcagttctcttctgccatgggatctggggatggaactcaggttgtcaggtttgtccagaaagctagttatcccgctgagccatcctgctcattttgcctcatctttacaggaacccatctgttcgcaccctcatgcctgccctccaccccatgtggagatgctcactgcaatatattctatttccttattaataagagaacaagaaagcaggcccatccacagagcgagtgtttcagtttcccggagatgcatgaatgtgctttgtgagtgtatttgcattgccgaggctctggtgaaagtttgcatggtaaactctaaggttgatttcaaaaacaaatagccgttctctctccccgctaaaaatcaaagcctcttaactgcccatgaatgggctgcagcattctctgtctgagctctgccctgtggcctttgctcttagtgagcatacagaatatctgccatatttctgtctggctgtatgctagttaatgtgcgggtagccagtgttttgagagggagacaatactctgtcttttcagtctctggctttgggtgcattttaaatattgctgttttgcattacccagaagctgctctgaaccctagcgggatcctgcaccctgccctgctgataggcagggctgtgagcacatgggtgggagacttcactttatacttctgaatggtttccatagcgatggagccaacaaattccggtgacgtgaggtgaaaataaatgggtcacatagacttgaaagaatacaaacatttgggctctcaaaagaaactgtacgctgggtctagagtctgtctcatgtggtccactatcccaaaatctcaaatgcccataacatcaataatgagtaccgacatttgcattttccttgtggctttctggtttttataatcttggcagtaagattatatgagttttatgagccctcctgaaagccccttactttttcccaattctaaaagaaagtaataaccaaaatgatagagaaaactgattattttgaaataaatgccaatatcatgtccagtatattaccaaggaacctatttcagaactgtaagccttcttagatatggagatacttttaaaatacatatattaaaatgcatctagaagaaaaccatttgaattaatgtcaattaagacataaccatggagccgggcggtggtggcacatctttgatcccagcactcgggaggcagaggcaggcgtggatcacagctaccattctttcctctgttaattcttcctggaacctgagattgaacacttatcctcacacttgtcactgtgagggaccactgagcaacttttgcacttcctcagataatttttttgtccatttttattatttgtttttcaagacaagctttctctgtagattttggaacctgccctggaacttgacctgtagaccagatcaggttggcctcgaactcacagagatatctgcctgtgtctctgtctcctgagtgctgagattaaaggcatgtgcactaccgcccagctcagacaattgctttgtttttgtttttgttttttcgagacagggtttctctgtgtagctttggagcctatcctggcacttgctccataaaccaggctggcctcaaactcacaaagatctgcctgcctctgcctcctgagtgctggaattaaaggcatgtgccaccaacgcccggtccagacaattgtttttaaacacatttttctttgctgtatatatgacagcagctctttggtaacatcttttaaaatcttttttttttttaatatgttaaaaataatttagttctgtgtgggtgcttgcctgaaggcctttctgctccacacgaatgcctggtgtccacagaagccagaagagggcataagatccttttggaactggagttacagaaggtgtgagatatcatatcagttttgggacttataccctgggcctcctgaagaacagccattgagtgcccttaactgctaaactgtctctccaggcagcctttgatagggtctcactataaccctgattgtcctaggatttgttgtgtaggcctggaattctcacagattcttccacctctgcctcccgagtgttgggaataaatgagtgccatcatggctggcttggtagcatttttaacccttgaaatgcaggttattctttacttcctttcagaggccattgctaagaaaaacatgtatgcctgtaatatctcccctgagtaaaaaacaaaaacaaaaacctgtaactattttaaaagttaagccaggcattggtggcacacgcctttaatcccagcactcgggaggcagaggcaagtggatctctgtgagttcgaggccagcctggtttccagagcgagtgccaggataggctccaaaactacacagagaaaccctgtctcgaaaaaccaaaaaattaaaagttaaaaaaaaaaaaacccaagaaacaaacaagcaaaacacattttggcattttgataggtttttttgtttgtttctgttgttttggtttttttttttcttttttctttttttttggtttttttagagacagggtttctctgtggctttagaagctgtgctagaactcactctaggctggcctcgaactcacagacatccacctgcctctgcctcccaggtgctgggattaaaggcgtgtgccaccaatatccggctagttattttcttaaaaaacttagaaattttcatatgtatgtgtttgtgtttgtatgaataggcctcatgtagctggctgctaatcttgacaatgtttccaccctcattaccctctgtatatttgttccagataacaactgtcttgcctctttgaaagatttaggtttggtggtggtggtgccgtcctttaatcccagcactcagtaggcagaggcaggtggatctctgagttcaaggccagcctgcacctagagagtgagttccaggacagtcagggctacaaagagaaactgtcttgaaaaaccaaagggaaaaaaaaaattagatttagctgggtgtggtgaagtatgtctttaatctcagctctgagaatttaatcttttgatttggaagccagcctagtccacagtagacagttccaggccagccagaaccacacagtgagaccctttctgcaaacaaaaaacaaacaaacagaaagaaagaaaacttgtccatgggataatgttaactgaagaaaaaaacaagacctcacacagactacagttctgcttcttacaagtgtaaatatggttattatgtggaatagaaactgcaaaggacacctaaatgctgactgagttatcttgaagtttggggatttgggatgcttttgcttctccaacccattccaatgagcgtgtttaatatgcaacaacaaaaggtactacagatagcaaatgtctttgacatttggggcatgcagtaatgaattaaataattgtttagtgtcaccacacagtgctcacctctgcagcacatatactaaaaatggaattgcacagagaagactagcatggcgcctgtgcaaagatgacacacaagttggtgaagcctttcatattttaaatgacacaggctttgggctttttgactaaacctcatttgttaatgttcaataacaagctcaagttgttggtctgttaggttggggaagagaacaagatcacccagaggagaatcactgtttaccttttggttcatttgcttgcttctgtaaacttacagaaatgagatattttatattttgctttttagggtcttttattccttttatttgtttgagttaatactctgcttttaaaaatgaatatattacaaacattgtctcacatcatgaatatttatagcattgttttcactgactgcaagcattgtgtgcacatggtttaatttgcctcaccattcctcttttaacagtcacatagctggttattcatctttttctacagtatttattaccatgctgaattctttgggaatatttctctctcctagtatattctattcctgaacatatattcagtctttcctattcatcagctggggtgactggtatgtgcacttattcttctgtgggagtgtgtgtgtctgactacctgtctaaatctcaaatgatggctctgaacacaatccaagtgtcctgctgggcagtcagtctaagcgtatggcagggacagtgtcacatctgtcttcataatagcaagctgcgtgtgatgatcttgtctggctggagatcaccactgcctcattgtctaggctcttgtgtgacctcctttctctcatgttcctttcaaattgcctgccctgtgtattgtattgtatgagtccttcgttccagttcaccactcagttagaatttgcctttacaattttgaatccaggctgttgagggaattaactgaagtaacaatgtgctctgctgcgcgcacacacacacacacacacacacacacacacacacacacacagagagagagagagagagagagagagagagagagagagagagacaccagtaaaagattcagaaagttatttcaaagtgctgatgtagtactgtgtgctaagcctgtcttcaaagctaaaccatgttaaataaagccaacctaagcatgctttcaaagcctgtgtataattaccaggacaggagaaaaaagaaaaggatagaaaagtcaaagccataaataaatcacttaaaactcttttggtttggtgtcttagtattgctgggataagacaccatgaccaaggcaacttctagaagaaagagtttatttgggggcttacagttcagagggcgagtccatggccctcatggcagggaacctggcagctggtggctaggcaggcatggactttgagagcagcttataacaaaacacatgcagatgccctagggaaatagctctgtcaagtgtttgcagaggatctgtgttcagatccccggaacccatgtaaaagcaactaatccctgtactgaggaagtaggtatatccctggatctcacggagctgaactccagattcagtgagcattcgtgtctcaaaagataagctgcagaataaccgaggaggacacccaacattaacctctgccctccacatgcacatacaaaacacatccgaaatacatgtgtataataagataattaaaatagtactgtaacaaactatagtgtagagagcggggcctgatggtgtacacctataatcctagaacttgagagactgaggagggagaaccaaggcccatttaaggccagcctgatctaccgagtgagtgacaggtagcctgagctacatagcaagatcacatgtttaaaaaatagtaacacaaaatgtcagggggctaaagagcatgtgttgctcttgcagagggctcagatttgggtaccaacacccacatggtggttcacaattatctgtaactccagttccaagggatttgataagctcttctgacctctgtgggcagtagacacacatgtagtgctcatacacacatgcaggcaaagcattcagacatgtaaagtgaagcaggtaagtcttaaaaacatgcccaaagaataatattgtttctatgaaaattccgttcttccccataaaaacccaaagaaagcatgccatttattggctttttattgctgtgaccaaatactcagcgtaagtaagttaggggtggatgatttgttttggctcagggtttcatctatttgtttagtgtgttgggggtgggggctgtgctccctgagatctgtgccagggcatgcacatggaggtagggctacttgccaagtcagctagctatctcttaccatttgggtctcaaggattgaactcaggttgtcaggcttggtggcaaacacctttacctgctgaactagcacctagccaggttcatcacagatgtcagtctgtcatcatcggggagggaaagagcagtttgtgtcctggcagctaggaccccgccttcttttttaatccaatcaacctattggacggtgctgtgcaatccagggtgtgactttgtccatgttctggctgggtcttttacttcagtttcctttctggaaacttccacacagacacactcagaagtgttctttattgatttttctaagtcctatcaaattgatcatctcagaatcttactgttggatgtgttacataattctcaggagatttaggcattcaatttacaaacaaaggaatttcatgcacttttctggataggagaggcacagtttggacatggtcttttgttttcttctcaggatcacccagtacactccgtatcagccagaggtgtctcaggggaggttggagagtttgctcaactaccagaccatggtgtctgacatcacaggtttggacatggccaacgcctccctgctggatgaggcgactgcggctgcagaggcgatgcaactgtgccacaggtgagaggctctgggggagagtccttccaggaggagggtatctcctagtccccagcatcttaaactgtgcattgcaacctcatgtggtgttccttagataaatgtagagtttgaaaaaaaaattgttttctgaatgtggggtgaaaggggagtccaacctgaacatctcccaagtgaaggaaatggagaaggcttgtagattcaaaatacctttattcagataaataccagccaagcgcaagccagagtgtgcccagaggtagcaaggcagggaggccagagaggggcccccacgtgtctacagcaccttaagaacctaacatgtgtcatcctgaccttcccttgaccgcgccctaacagggatggtcaagcacatctgtagccagccctttggaggcgtggttatagtgtctcccgacagtggggcaaccaaaaattaaaataaaacactgaggtatttctggtagagcttgaattatctgacttcattgcagccttggtcctcaatacacatgacacatgtacactttgtacctcacatgtcttcatgtcacacactaccaacaaatgttacctgaaacatctcagcaaaggttcaaggttattgcaagtattgcatgatatgaattagaggagtgagggttttgtttttgcttagtttttggttttgtttgtttgtttgtttgtttttggtccggcctcaggcaccctaggctggctatatagctgaggatgaccttgaactcctgattcccctgcctctaccttctgagtcccaagtttaggattatgggaatgagccaccatgacagactgaactacaggaggcaatctgtgcacactcactctctgaggctaggaggcaatctctgtgcacactctctgaggctaggaggcaatctctgtgcacactcactgatgctaggaggcaatctgtgcacactcactgatgttagaaggcaatctctgtgcacactcactgatgctagaaggcaatctctggaagtcagttctccttccactctgttaaggcagagtctgtctcgttttgcccaactgagactctaagctgaagtaccccagtgacaacgaaactctaagatgggttattttagaagactttttttggtagtcatctcaacttcctattctatctaatacttgcccttttatcatgatatagattttttaaactgaattgacttgttaaattgtgtaagaacacaatttaatttcagtgagttgcagtcacgaaccaccagtcattaatcacttgtttccttttacaatattcttcgattttccctcgctgcttagaaactctgattttagttcagggaaagtggctcagatagataacttggcctggattaatccccagcactacccgtactaggcttagtggcggcacacaccttcaatctcatctcagcactgtggaggcaggagaatcagaagtttaatagagttagcagccaggctgggatacccaagacactgtctcaacaaataaaaaataaaagaaaagaaaagaaaagaaaagaaaagaaaagaaaagaaaagaaaagaaaacccctgatatttggaaactcctttggaaatgttcaagtttgaatgtggtttttcttttcaacagacacaacaagaggaagaaattttttgttgatcctcgctgccacccacagacaatagctgttgtccagactcgagccaagtaattgatttcatttgtgttttgaaccaagggtaatatcatgtgacctctacctcatctgtcttccccgcttccagtctccctggaggtgaacttgctttgcactgtgtttgccgagttttcttttcttccctcctttcctccatggacgtctctgctaagtacgtcgtcaattctgagggccaaatgatcggtgaatttagtagcctttgcaccatagcaagttaccatgctattctgttatcttttggtaaaacttaaaatgctaacatcagcttgagtcaggaggattttaagtctgaggcaacaatgagccatgtagtgtaaacaatagatgttgggcctatagcttagaagtagagcactggcctcagatgggtgaggccctgggttctatccctggcaccacgaaggacctgactcacagtggataaattcataaacaaaaaatgaaatgaagaaatttcatcagtgtttttggacagttggaaaaacagaactcctacacaactgctatggtttcccgtgtccttcgggcaaatgtagtctctaaggaatccacacaacacctagaggagtagtgtaagcagctctaagttcctttgccatctggaagtttagtcctgtaagcagctgaaaaagccccagctcagctactgctgtatttgctttctgcgttggaaatgcgggtcatccttctgcccctatccacgcttcagaagggatattgagtctttgttagaaggttttaggaatcgtaaggaagcccttcctagcatcaggaggtttttcttttaccatagctgacctggagtaaatgtcacagtgatggctcggcggctgtgggtgttggatctttagctctagggggtgatattcctctcagagtaggttgcagagttgaggagaggggagtgagaaggacggaagaaagggacagagcagagtgaggcatgcatgtgagttggtgtggagcactgttactgaggaagggccaagtatgaagtgaattgggctggaaggacacagaggtaagtaaaacacaggaagggaatagtttcactggaaaaaagctggtgctcattgaatttctgggctggcatcatggcctggttggcccgaaggcctgagatctatcaccagaaccgagagagcttactctccaaagttgttgccctctggcctctacacatgtgcctgggcatgtgagcatctgcactcagaaacacatcacacacatgcgagcacacacacacacacacacacacacacacacacacacacacacacacacactaataaagaaaacaatttttcccttctacttacagatataggggggtgcttgttgagctgaagttaccccatgaaatggatttcagtggcaaagatgtcagtggggtactgttccagtacccagacactgaggggaaggtggaagacttcacagaacttgtagaaaaagcccatcagactggggtaggtaagccccttgttgaagcccaggaaggtatgtcccagttttcatatctgtctgccttttggtatattttcatttctttccaattgccacatggaatggtgaaattctcttgccctactccttcctctttgttaatgccattcactaatgtctggtgctcagtagcgttcagtaaatattagttacacgaatgcacaagcaagtggaattggcagggatgcagcctccccgccagtgtgtctgcagtggagatgactcctgtgtcctcatgacttctccatttcctctccagagcctgacctgctgtgccaccgacctcctagctctgtgtattttgaggccacctggagagtttggagtggacattgccctgggcaactcccagagatttggggtgccactgggctatgggggaccacatgcagccttttttgctgtcagggaaagcctggtgaggatgatgcctggaaggatggtgggggtgacaaggtaaagtttcacaccctcttattgtgattatgaccttccttgtttactttttctttcactttcatctctcgtgtgtgtgtgtgtgtgtgtgtgtgtgtgtgtgtgtgtgtgtgtgtgtgtgtgtgactgtatggcatgtgtgcctaagtgcccaaggagacctgaagaaggcatcggatgatagatccggaatgtccttctgtatgatgtgaatatgtgttgctttcattgattaataaatgaagctgttttgaccaatggccaggtagaatatagctagtcgggaaattcagacagttacagagagaaagaagacagagtcagggagccgccttggagctgccatagaagtaagatgccagaacattactggtgagccacagccatatggtgatacacggattagtaaatatgggttaatttaattgtgagagctagtcagcaatgtgtctgagcttttggccaaacaattgtaattaattttaagtccagaatgactaataagtggctatggggaccagtgtgcccgagagaaaccggtgcagggtaactgggcaggacgagaaacctccagccacaatcaggtcccctgaagatggagctataggcattaagagttgtgcagtgtgggtgctaggaaacaaaccaggtcttctaaaacaagcagcaagtgctccgcagctgagccacctctccagcccccagcccctccccgcccctccctgttttttcccctctgatttctctctaaatttaattggcccatgtcaaatagactaaagacaagtatgacacaaattaagaagagggaatctgggtgtgcaccggtacttctgcacactgtaattcagacaatatggaaacatgtgtttgtccttcgtaaggcatgagtataatcatgtacagcaatctcggttgatagacagcctggggaggcctgcatagtttaagtgctttgtgcctaaccagtttcttaagtatcccattgtggaaggaagaactcacttatgcaagttgtcttttatacacacacacacaccaaaaacaagtacagagaggaattaaaaacacaaaccgagtgtgatccaatcggtgtctggagattcctgccatgtggctttgagtctcgatggcttcccttggatggtgcttccttccttctcagttttaccacagtccccccaaactattcatctatccatccatcaatcctttcatccatctgtccatccatccctatctatcatctattgtctaatatttctttatcatctatgatctatctatatctatgatctatctgaatatctatcatctgtctatatctatatatctatttatatgttatattaaagaagggaagtctttatgaggtaagtagtgagactttttttttcctttctgttttcttagtaagcattcagtctcttcacaccttcagtggagaaatcgttttcttggcttatcaccctttcccctctgtcagccatggagatccagtgacgtatactccttggtcccatcatcctatcaggcagagtaattcctgggaaattttctttcactgttccaggcttgattgtatatgccttggtgcctcaaagctcaaattaacaacctatatatagtcctattgagaaaaagggcatttgggggctgttttttatgaacttgcacccacaccgagctactgaatccccttcagctttgagagcaagtacatctaggacaatcccagtgctgagattagcggtgctgactggatgtgctgtcttgacccagggatgccgcagggaaagacgtgtaccggcttgctcttcagaccagagaacaacacattcggagagacaaagccaccagcaacatctgcaccgctcaggtaagtgtcatatccaacctgactgctgcatgatgggaggatctcactcactctctcatttcctcactcattgtccacctgctgaaccatgaggaacacgagagatggcagatcttattgacagagatgtctggtcttatatcttactgctatcctatatcacatgcattgcccataaattcatttcatcattattaacaaaacaataaaaagtacaacattgggaccagtgagatggttcagtggttaagaatgcttgctattcctctagagaatccaagtcaggttcctagaacccatgttgggaggctgcctgaaactccggttccagtggatccaaagccctcttctggtctctgagcacaccctaacacatgtgacatgcattcacaaagacacacacatgcatacgaaacacctacagataaataaaaataaatcttataaaagactttgtgtttatttttgcctagaatcacgccttcaacatcttttttttcccactacattattttattctcagaaacagaatactctttagttcaataagaaaattagtttcgtttttgtttattgtccgtgactttagcttagtgacatagtacttgaccaaaaaagcacaaggccctgggttggctcctaagaattacatcaaaataggagttttaattaagtctcactcaaacatgtttagttttgtttatcccagtgttttcccaaatgcattgtcttggctaatcttcttctttttttttttattttattagttctagttagggaacaagcttatttcaagtcccttctccctctccctcccctcacccccagccctccttccccacccccagtctaccccccaccccatccacccaccactccccaggcagggtagggccctcaactggggctctgcaaagtccaccaagtcttcctatgctggtcctgggcccttccccatgtgtccagggccagagtgtaacccttcatatgggatgggctctcaaagtcccttcttgcaccagggaaaaatactaatccaccaccagaggctccctggagtgcagaggcctccttattggcatccatgttcaggggtctggatcagtcttgtacgggcttcccggacagcatctggggtcgatgtgctctcccttgttcaggtcaactgttctccaacctggtacagaccccttcgctcttcattcctccctctcttcaactaaattcccaatttcggctcattgtatatctgtggatgtctgtctctgtttccatcagccactagatgagggctctaggatggcataaagagaagtcatcaatctcattttagggggagggtttttaggttatcctctccaccgttgcctggattgtcagattgtgtcatccgtgtaggtctctggagatctccctagttccagatcccttctcgggcctatagtggctccctctgacattgtatctctcatcctgctctctttcctctattcttcccccaactcaatgtttctgcccctccatttcctctcctcttctcctcttctcttgctcttattgtagcagctcctttcccccccaccctcatgcccccaattagttcgggagttcatgccacttccattcctggggaccatttaacccttagagtccttcatgtttcctagtttctttggtgaagagcattatatactggtaatcttttgctctatgtctaaaattcatatatcagtgagtacataccatgtttgtctttttgtgactgggttacctcactcaggatggtttcctctagttccatccatttgcctgcgaatttcaagattccattgcttttttctgctgagtagtactccattgtatagatgtgccacattttctcaatccattcttcagtagaggggcatctaggttgcttccaggttctggctattacaaacaatgctgctatgaacatggttgaacatatgtccttgttgtaagtacatgccctatttgggtatatacccaagagaggaatggctggatcttgaggtagactgattcccatttttctgagcaaccgccatactgatttccagagtggtcttacatgttcgcactcccaccagcaatggaggagtgttcctttttctccacatcctctgcagcatagattgtcattggtattttttattttagccattctgacaggcgtgagatggtatgtcagagttgttttgagttgcatttctctgatggccaatgattttgagcactttgttaagtgtctttcagccatttcagattcctctgttgagaattccctatttagttctgcaccccactttttaatttcattgtttggtgttttggtggctagcttcttgagctccttatatattttggaaatcagtcctctgtcagatgtgggatcggtgaagatcttttcccattctgtgggtggtcgttttatcctactgactgtttcctttgccttgcagaagcttctcagtttcaggaggtcccatttattaattgcagacctcagtgtctgtgcttctggcgtgatgttcaggaagtggtctcctgtgccaatttgttcaagggtagttcccactttctcttctagaagattcagtgtggctggatttatgctgagatctttgatccatttgcacttaagttttgtgcatggtgacaggtatggatctatctgcaattttctgcatgtctgaatccaattgtaccagcaccatttgttgaagatgctatcttttttccattgtatagatttagcacctttgtcaaaaataaggtatccataggtgcgtgggtcgatatcagggttttcaattcgattccattggtctatcagtctatttttgtgccaataccaagctgttttcagaactatggctctatagtagagcttgaagtcggggatggtgatgcctccagaagatcctttattgtaaagagttgttttggctatcctgggctttttatttttccatataaagttgagtattgttctttcaatgtctgtgaaaaactgtgttgggattttgatggggattgcattgaatctgtagattgcttttggcaggattgccatttttactatgttaattctacctatccaagagcatgggagatctttccattttctggtatcttctttaatttctttctttaaagtctcaaagttcttattgtacagatctttcacttttttggttagtgttaccccaagatattttatgttgcttgtggatattgtgaaaggtgatgtttccctggtttctttctcattggatttatcatctgtgtatagtagggctactgatttttttgagttaattttgtatcctgctaccttgctgaaggtgtttatcagccgtaggagttccctggtagagtttttcgggtcactaatgtagactatcatgtcatctgcaaatagtgaaagttttacttcatcctttccaatttgtatccctttgatccccttttcttgtcttattgctatagccagaacttcaagtacaatattgaagagatatggagagagtggacagccttgtcttgttcctgattttagaggaaacgctttgagtttctctccatttactttgatgttggctattggtttggtgtatattgcgtttatcatgtttagatatgttcctgttattcctgttctctccaagatctttatcatgaagggatgttggattttgtcaaaggctttttcagcatctagtgagatgatcatgtggtttttctttttcagtttgtttatatggtggattacattgatggattttcgtatgttgaaccatccttgcatccctgggatgaagcctacttgatcatggtggatgatttttctgatatgttcttggattcggttggccaatattttattgagtattttagcatcgatgttcatgagggatatcggtctgtagttctctttcttagtcatatctttgtgtggcttgggtatcaaagtgattgtagcctcgtagaaagagtttggcaatatcccatctgcttctattgtgtggaacagtttgaggagtactggaattagctcttgtttgaatttctggtagaattctgcagtgaagccatctggccctgggctttttttggttgggaggcttttgattactgcttctatctcattaggggttatagttcgatttaaactgtttatctgatcttgatttaattttggtaagtgatatttatccagaaagctgtccatttcctttagattttccaattttgtggaatacaggttttcaaaatatgacctaaagattctctggatttcctcagtgtccgttgttatatctcccttttcatttctgattttgttaattagcatgctctctctctgccttttggttagtttggctagaggtttgtctatattattgatcttctcaaagaaccaactctttgtttcattgattctttgtactgttttcctagtttctactttgttgatttcggctcacaggttgattatttcctggcatctactccttggtgtgtttgcttcttcttgctctaaagctttcagttgttctgtcaattctctaatgtgactttcctccagtttcttcatgtgagcacttagtgttatgaacttccctcttagcactgctttccgagtgtcccataagttcgggtatgttgtgactacattctcattaaattctaggaagtctttaatttctttcttcaacccaggaatggtgcaattgggagttattcattttccacgcaaatgtaggttttctgcaattcgtattgctgttgaattctagctttaatgcatggtggtctgataagatacagggggttatttcaatacttttgtacctgtggaggtttgctttgctgcctactatgtggtcaatttttgagaaggttccatgtggcgctgttattcttttgtgtttggatggaatgttctatagatatctgttaaacccagttgtgtcataacgtctttcagatcctttgtttctttgttaagtttctgtctagtagttctgtccaatggtgtaaggggggtgttgaagtctcctactataagtgtgtgtggttttatgtgtggtttgagctttagtaatgtttcttttacaaaagtgggtgctttcatattaggggcatagatgttcaggattgagacttcatcttgatggacttttcctgtgatgagtatgaaatgcccttctttatctcttttgattgctttcagtttaaagtctaatttgttagatattaggattgctaccccagcttgtttcttgagcccatttgattggaaaattttttcccatccttttactctgaggtatcgcctgtctttgaagttgaggtgtgtttcttgtaaacagcagaaggatggattctgtcttcgtatccattctgttagcctgtatctttttatgggtaagttaagaccattggcatttagggatattaatgtccattgttcattggttcttctttgttttggatttattgttggtggtatcattgcgcgtggattttgccctcctgtttctttttgtgtttggtgaaattagattaactactgccagtgtttttgtaagtgtagctatgttcgttgggttggaattttccttccagagccttctgtagtgctggatttgtggatatatattgtttaaatctgtttttgtcgtggaatatcttgttttctccatctatagtgattgaaagttttgctgggtacagtagtctgggttgacatccatgctcccttagtgcttgtagggtatctatccaagaccttctggctttcagagtttccattgagaagtcgggtgtgattctgattggtttgcctttatatgttacttggcctttttcctttgctgctcttaatattttctctttatctgtagatttggtgttttgattattatgtgtcacttctttttgtggtccagtctgtttggtgtcctgtaagcttcttgtactttcataggcatatccttctgtaggttggggaagttttcttctatgattttgttgaatatgttttctgtacatttgagcagtgtttcttcaccttcttctacatctattattcttaggtttggcctttttacggtgtcccttatttcctggatattttgtgttagggatttgttggacttgaggttctctttggttgatgaatgtatatcctctagcatgtcttcagtagctgagattctctcttccatctcttgaatcctgttggatatgcttacatctttagttcctgatcgtttatccaacctttccatttccaacatcgtctcattctgtgttttctttattgtgtgtatttcagctttcatgctttgaactatttcaagagcttccttcacttgcttggatgttttttcttggctttctttagattctttaagagatttatttatttcttgaattttttggtttgtcttttcctccaattcgtttaattttttgtttgctttctcttctatttctttaagggattttcttgtttcctctttaaaggtctctatcaacttgctgagataatttttgaggtccatctcatcttcatgctctatgttgggcttttcagctcttgctggaatggagtccctagattctggtggtgtcatattggtctttctgttgttgggtgaaatcttattctgtcttctccccatatcttcttttagtgggtgcaggtgggttctcttatctcctcttgtggcccagtggtgtgtgggggctaggaattcaatgtccataactctagatgatcttgacgctcctggtagtctcctcactagttcctatttcctcggtcgttcggcggaatggaagagtggggtgctagcagatttggggcgcagggagctcctccctgcctgggcgtgtgggcagaaactcactcacctagttcctggtcacagccggcaggcacaggcgggggtgggaggatgggggtggtcgggtttttctggcctggggtcgggagtgggcagaaactcactcacctagctcctggtcagtcgacggcggcggaatcgccttcaacatcttgaattgataaagttcagagaaaccataaaggaatgctctttaatctccatgtgctttgagtgtatttattctgaagttctggctgggttcatggtctcattgtagttccattgagctacaatggaagatctccaagaagggggccaggagggcagaggcgacatgatgtaacatgcttttgggggtcatgaacagtgttcctgacattgacagaggaaaggtagtgattctggggcttctgacctccttaaagagactcagccgaggctgagtgcacgtgtacgcacgcacgcacacatccccccaacaaataggcacagctaggtgtggtggtatatgcatttaatcccagcactgcaggaagcaggtataatcttctggaagagtatccagtgctcttaacagctgagccatctctctagcacctattctatttttcaaatgttatgtgtgcatgcatgtgagcaatgtgtgtgtgtgagggtggatgcacgtgtgccatggcacacttgtggaggtcagaggacaacttgcatgaatcagttctccccttgcaccggagtatctggaaattaagctcaggtcatcaggcttgcacggcagttctcttacccgctgagccatctcactggcccttctgcttcaaactttgaaagtcattttcccagtatcctggcctgtaatcgctcatactactccagggttgctcactgcaagcacgaaattgatcttctgctgagacatggctgacctttcctgagctgtgccctttgtgatatctttgaggatcatctattggtacttctatctactgttgcttgttcttagtcatgcgttttctcaattagcatcatgccatccaccctgaacttctgttacttaaatttgcatcattgaaagagcatggctattttttttcatctctgaaagtctgttaatggattatatttcagatctttctataactttgtggcctaactgatataaaaaatcctcaccatgttttgtgccccacttctttctctcacttttctttgaaacaggacctcatgcattccggggagcctcaaagccactatataactaagaattctcttgaatttctgatcctccagcttctagaacttgcaaggtagagaggcaggaggatcatgatatcaaggccaccctgggtagcataagaccactttccccaaagaaatataatagagatttattttcaatatataaaacgttgtgtgtgctttacaggaggcaagataatgtctaagcaaagcatagacaaagaaaatcagacatcagaggattggacctggaacaatgactatttagtgtgatctgaatgtaagcaaagatttttttttaggtctcccaaaaagccaggcatgtctgaaatctctgcagtagggagactaaggcaggaggattctgagttcagggacaacctgagccatacagcaggatcctgttaacaatagtaaagaggagcagaggtgagatggttcagtgggtagtgctccttgcacatagaactcatgacccaaacgccatccacacagcctacaaagtagccggggcagattgccttccaagaattctcatcttacttctgtgggcttgttctctccctttccctctttcccccatactcacacaaatagataaatataaaggtgtgcaggtgaatatacaatatataaatactttttaaaaattacagagcctgccaggtgttgtggcacatgcttctaagtccagggttcaggggatagaagttggcatatttttgtgagtttgaggccagcctacatagtgaattctaggacatctggggttacataaagagatcctgcctcaaacaaaacaaaaaataaacaaatgacagggcctggaaagatgactctgtgctaagattccctattgcttttgcagaggacctgggttcagttctcagcatctgtgtggtggctcacagctgtctgtaacttcagttccagaggatcaattcctcttctaacctccatgggtcctgaatacctgtggtgcacatacgtgcacccagacacacacatacatggaatattaagtgaatgaatgtttttgaaagacatttatatatttaatctgtgtgagtgtgggcacacacatgccatgacacttgtgtagaggtcaggggacacacctgtgtcaggtgttgcacttctgtgtctgtggttatgtgggttctggggatctaaacacaggtccttacactttggggtaagtgctttaccccttgagccatctccccaggcttcaccgacctgttgattacagaagctcagtctctcatgctttagcctcagaagaattgttttcttggagtgttcaggtgtttggaaattgcttgttgttttgattcttggagaaatgttgaattgtgcataaaatctccagatctcacttttttctcactgaggtctttactgctccaccgccttgcaacagtagatgttgctttttgagttgatagcagcccgtgctccccttatgactgacatgctcctattgtaccagtgagacccccttaataagggttagtgtgatgactccagtgccattttccctcaggctttataaacagtccttggttgtcatagagaatgcaggatattaaatcattttgactcagttttcttccttttggacatcctaagtcaatcattcccccctcccaccacctgtcttccaacatgttgctgtcattgttgataccataaacactctttcttttttcaggccctcttagccaacatggctgccatgtttgccatttaccatggttcccatgggctgaagcacatcgctaaaagggttcataatgccactctgattttgtctgaaggtgagtcagttatgtttctagcataacaagaatgatacatgtgactaactgcatgcagacttggagtgtgtccaacactgaatacaaataaaggtcagataagaaggaggacagtattttcaatgtctacaacagtatggcagacttttttagaaaggctctcactatgtagccctggctggtttgcaattcgccatgtaaaccaactggcctcaaactcacagtaatacctctgtctctgcctcccaggtactgggacaaaaggcatgagtcaccacacttagtgagtgttgatatttgtaatagatgaataaacatttctatgagaaaatgagcagaagttattatacaatttagaaataaataaatatacaaatagatggccagtggaccctataatttgaacctgattattaatccaggaattattttatctttttgttgtgttcttgacaaagtcttgtgtacagcctcaaacttctgatgtagcagaagataaccttgaactcataatcccctgcctgtgccttccaagtgatgagattacagacatgtgccatccatgcacaccgttttattatttttaagttttagtttttgtatggttctggggatgaagctcaggactctatgtgtgttttatcactgaggtaggcccctcagctcttgttcctttacgatggggacaaggtaaagaaacaagattaaggaatgtcaataccctattggtgtagttttttatggatgacagttaagtattgtgtatttaaaacttctaaagtgatgtggggaagatggcatcacaaatacaaaggagatttatttgccccagagtgacagagaacagagataagggacaaagacaggagatagaggaagagaggtaaaggggaagggagcaagggaaagggggcaggtgttgtcccagaggacaaaggattgcctctagatggagaggagacagacatggcacatagaagaacggtggtttataaaggtaaaggcacctcacattaggatgagatgtttaattttaattgagcatgttcattcgggtagccaaagggaacttttgactgatggacttcaatactttgataactggaccttggtagtcagccttagaaagaagaattggtcaaataagggaatagaccttggcgggtagctttaggcatgtaatttaatgttttttagcaaggcagagggaattggggagaattccctgctagaaccacatgctccattcatagttcagatcttcagattcctctttaaaagctgaggtgtggctcaggttacactacatggctgtaatcccagcagtggagaagtattgactaatcccagcagtggagaagtattgactaatgattcctggtatttactagccagctagtttagctgagatggttcacttcagattcagcttgaccctgtgtctgtcacaaaacaaaacaaaacaaaacaaaacacaaacaaatggtagaaagagattgaagaagacagtgttgacctctggcctctacatgcacacattgcacacacataaaagtacagttgactaacaacttctagctgccaaaacaacagcaaaaaaaaaaaaacaaacaaacaaacaaacaaaaaacccttaaaaatggtgcctgctgccgggcgttggtggcgcacgcctttaatcccagcactcgggaggcagaggcaggtggatctctgtaaattcgagaccagcctggtctacaagagctagttccaggacagcctccaaagccacagagaaaccctgtttcgaaaaaccaaaaaaaaaaaaaaaaaaaatggtttctgcaatttgatccagctacaccaatattaggaatttatctaaaggaagcaatcagataaatatcccagttgtggaagcagattaaatgctcgataattacataatggtacatccatatgtttgactactatacagttattgaaaataattatgtgggaatcgatctatagacatgcacacacacacacacacacacacacacacacacacacacacacacacacacagccatttctcatatgtacatcaaaacttatttctggttgatctgctggtggttttacttcccttgtttggtaagtattttattattttctataacatagtgataaattcatttaatacccctttaaaacaaccaccagtgtactgaccaggagaggcacaacctacagtaggggtcgcctcttggcatctgtgatgttagtggctattttgctcagagctccgagatgactgtgttccctgtgctgttctaggtctcaaacgcgcaggacaccacctccagcacgacctgttctttgacactttgaaggttcagtgtggctgttcagtgaaggaggtgttgggcagagcagctcagaggcaaatcaactttcgactctttgaagatggcacagtaagtcaaatgcttagtatttttaccagttctttgtgctttcatggattctctcatgagataccttctatttttgtttaactaatattgggatttggagtcttttttttttccgagacagagtttctctgtgtaacggtcctggctgtcctggaactagctctgtagaccaagctggctaggaagtcacgaagatcgacctgcctctgcctcctaagtgctgggattaaggacatatgctgccaccaccacccggctggagtctttttttttttttttttttttttgtagtttttaatttcgaacttgcactgtgactttttcaaagaggaatgattatcctcagcttttctcaagactgttttttgtgtaagagactattcatgattaaacctctaagttagcaaagagaattaaaggatgaaaaagcttactatgtttagttcctgtgggagcatcctgaagtcattaattagactgttaatgtctactccaaagcttgtcaagtcagagactggtctagtcactttccattaaagatcagtgtggtcctaatgatatcctggtgttctaaagtggatgaggagtttgaccagaaccttcttctgctttggtaacttgtatagtttcctgcagtggcctggagtttggagctgatgatttccgtctgatttctgtctctgtagcttggcatttctttggatgaaacagtcactgagaaggatctggatgatttactgtggatctttggctgtgagtcatctgcagtaagtaaagacgcaaagtcttcatactgattattagatatggtgtcaagggtggctctgctctgcctcttgcgggtctgagtatgatgagtgagaacaggctcaaatgtggcaatgaccagtctgctgttcgaattacggcactgcctgttcctttctccctgtaactgctgatagctaaaggttcctgtttacgaacccttccaggctagggagtccaggctaggtggattattagtgatatgacaccctgatttcaaagacttgtgacattgtattctgggaaatgtattacactcactcatttaatgactaattttcaaggatgtaatatgtaccaggtattatgttatgccctgaggttatgatggcaaaacgaacatggtccctgactccactaagagtctagaccagtgaggagccagacacataatcccagcatgttccgtgaggaaactgtgagcagaaagggtcagtttctcaccagggcttggatcagtttcctactctaagatctgaaacatgagggtgagttgttttacaccaagatggtgtgacagaagaggaggagggtgggttcagatgtccctctctcctggggaaacatccataaaggctaggaggagagatagtcctgcaacaatgaagcagttctttgtggctgagtgggtttccatagcagtgaactatcaggaatgagcaaggcggggttacccttccataggattgaagtgaaagagaagtcagtggctccctagacctctggtgagatctacccagagcactctacacactttctccatggcttcttgcatagatgtgactttagtgactatccgttaaatgagccagtgaaaggaaacttttattatagatgctgaaataccttccagagtgctgagtggtgatccatggttgcctggactcttttgagaacatttgttagctccagataccaattatttcaaattcccaggaagcttcacaatgttcccccaatgttgaattttattaattaaataggatcaagtaaactccttcccccgtagaaccctgaactgattttccttaaagctattgatctgtgtgcatttgagggatgtttctattaatacaagacccaaggtaactgtgtttccatttggttttgttgctgtcatagcacactgaccaaaagcaacttaggggcaggaaaggcatggcacaccatggagggaagtcaggacaggaactaaggtggagaccaggagggagtgctgcttactggcttgcctcctcacacaatccacgccctcctatcaagtgtggcaacattcaaagtgggccacaccctccctcatccatgtcaatcaagaaagcactccacagacttgcctgcaggccaatcagatggaggcaattctcagctgagattccctcttcccaggtgactttagtttgggtcctgttaacaaaaacaaactggcacaccaagccattagcaaagagagggaaggggagctggccatgcatttaatcagatgttctagatagaaaatccttaggatctgcatatgttttctcccgttatttgagcagcttcttgactctctggctaatatcactaacaaggtttttgttgttgttgttttattttggcttatttattttgttagcctagtgaataaactcaggacctcacacacactagacgagtaagaacttgactactgatcccttcatttacagctcttggttgctgttcttttggtggagttcactaggtttttaacttgggccttggttatctggtcctgagctacacccacaactcaattgttcttattatttattttaatttgttgttgttgttgttgttgagacaaggtccagtatagccaaccattgaacaactttattttttagatttacctatttttattttacacgtatgagggatttacctccaacaatgtatgtggtcggaagagggtgtcagattccctggaactggagttacagagagttgtgagccaccatgtaggtgctggcaactgaacctgggtactctggaaaagcaagccattgctgttgttaaccactgagccatctctccctcttcatcaagattgacctgttaatcttcttgcctctacctccccagcactaggattatacgtgtgtgccacacatccaattcctgctgttctgtaggtaaaatgcagatctcatgcatacttcagaagttttctaccaatttaactacaaactcagcccctcaaatgtttttatttttttcactttttttttattagaaagaaaattattttacatgtcaatcccaggtccctctccctcccctcctcccctgccccccccaactaacaccctacccatcccataccctttctgctccccaggagggtgaggccttccatagggggtcttcaaagtctgtcatattctttgggatagggcctaggccaacccccttgtgtctaggctcagggagtatccatccatgtgggatgggctcctaaagtccattcctacggtagcaataagtactgatccactacaagaggccccatagatttccaaggtctcctcactgacacccacattcagggggtctggacaagtcccatgctggtttcccagctatcagtctgggcaatgtttttaattttaatgaaatacaagtctgcaacatcctctgtgaccttcatggaagcagagaggtgagctaagggaggtaagtagtcactgtgactcaacacaactcagctcctaccagtttggttcaaactttgggagtctgaccccaagtggtttattttgggtgtatttaagcacagcacaatttggtgaaaattattctggtgatgattaactcaatcccgactatacaacaaagctcatatgtaactacatcgaaactctttgtaaagtccataaagatagtttttagtgtttgactgaggaaaacagatttgtttacaattgattgagaaaaacaaattcacagtaaggatctagaagagggtccagtgctggaaaagtctccagtcatgaagatattgacgatagcacattaaaatcattgtgaaggttagacatggtagtgcaatgtacccctttaatcctagcacttgggagacagaagcaggtagacctttgtgagttcagggatagcctatctacatagcgagttgcaggccagccaggactacatagtgaggccgtctcaaacaaataataacaaaggacaagagactattgcgaaatcataggtcctgtatgtctgtccctcaattttcttctaagtgttcaattagtttggcttttaaatgaatgtcttgatacactttctttttaaattttaatctagcctggaagcttccagccttgcccctgtccctcagttcccatggtctctcttgtaggaattggtagctgaaagtatgggagaggaatggagaggtatcctagggtcttcactcaagagaaccagcccatttctcacacatcaggtgttcaacaggtttgtgtggcttcagtcaactctgcattttgtgtccaggcagtgatccaggggcatgggagggcgttacttctgatgtcaatgatggtaggtcctgggttattgccactcagctaatcttaccaacatatccatgccagaaagaccccatccctggtgtgagccaagcataccttgtcttctggcagttcgctgtgctgggcctgtgatagggaggggaatttgcagatgtgcttgcaaggctgaagtttatctcagggcctctgtcctcttcccagtgttctctcattctttgaaacattaagctaactaatcattatcaataaaaagtcaggagtcaaatatcagggtaagaacctgaaagaccagagaagtagggagcagccaccagtcacctcctacctcttctgttcctccatccccaaagggtcaagatcctctctctgcattgccttagtacttcctgtctcctctctgtctacagtcctccacacctctatggttagtttaagtcacctagtggctagctccgccctctaactcaaggcaaactttatttgtcagaactcaatcaaaatatcacacagcaattcttaaaggtagcgtcttgcatcaggtgtgctctgagacccactagagtctctgcccttccctatgacattccattaaggcatgtttggagttaggaactcctttcttactttgtgtgaggatcgtcacggctaattcaatggctctgaccttgtgttttatattcacagctatcactcagaaaccaatctggtccggtatatgaagaaattggagaacaaagacatttcccttgttcacagcatgattccattggtactgttcgtggcctttcttctcgattcagccccatccctgcatcatatctaatacaatgcatgagggaagaagctgtaccttgaggggaggtgggagggttcgtgggctatagaaaatcattaatgtgatgcttcttggatctgcttcttcaagggatcctgcaccatgaagctcaatagctcctccgaactcatggtaagtagggcttatctaccaagtgggtattcaggaacaaatttccagttgttcagaaatggatgagagaaacctacctggatggttactatgtgctctaatgatcctttactttgccattctgcaatcatggcagaggccctgatatttccctcaacttgatcagttaaatttacggataaagccaggtgttggtagtacatgcctttaattccaggactcaggaggcagaggcagacagagctctgagttgagggctaacctggtctaagaatcaagtttcagaacagagaaaacttggcctcaaaaaagaaaataaaacaagaacaacacaatttatggataaaatttattcttattgtcaaagttttacctcaggataattttaaagccacctatataagcaattgtcccagctcagggtcccaaatagctaggtcttacatagtggggcatatgtaagattgtcattgttataatcttttatagatttgtttagtgtgtgtggacatgcacatgcatgccacagtgcattgcagttttgtttagtgtctgttgtatgtgtgtacatgcacatgcatgacacaatgcattacagttgtgttttgtgtgtgtacatgcacatgcatgccacagggaacagtggttctcgattccactctgtgggtcccagagatcagtcaggtcatcatgcaacatcatcattgaatcaccttgcctaccctgtaaaattaatttttcttttaagttaaaataggtaactagtttttgggtcttttgttttgttttctaaatctgagtttttccacactcctatttttatcagtttgtatttagtctcaaaggtagacttaagaagataagcatgggctggaggttggctcagtggtagaaaccttgccaggcatctgtggactgcggtttgcttcttagttacagcaaaagagaaaaaaactaaaggtctaaagcaaacttttggcagtcacatgcctgtaatcccggtacttggatagcaaaggcgtgatcttgagttcatgtgtcaataaccaaacagaaaaataaaaatatgcctctttctagaaatctattctcaatgtcagaagggtgagatttgaggtttacttttattctctgtatcaacagaaatttgattgacatggtgttgtgagagatgctcatctataaaaggccaagattgtgtcaacagagttagcatattccttttatttcttgggagtactaggaactgattttggattgtattagggagagtctttcctatttgcatttctgttcatggctgattctgttcagtgaaaagaaaatatgaatgcatgaaagcacatgtaagagttggatgaaacttactgtttcatggatgtaagtctgttctgggacctttctgctcctggataagtagaatggtgtttctgtgtgagttttctttatggctttcttgtcccacttgtacagagtagatagtaatagttcttatttcattaggttgtgcagagaaaccgaatgcatattctaagggccttgacagcccgtggccccttggtgttgccatattgtcatcatcattattaaaatcattgctacttttacagtgcacgcatgcttatattcctcttcttgctcttcagcccatcacatggaaggaatttgcaaacatccacccctttgtgcctctggaccaagcccagggatatcagcagcttttccaagagcttgagaaagacctgtgtgaactcacaggctatgaccaagtttccttccagcctaacaggtaaggggctttgttccctcatgtcagcagcttatacccacttccaaaaagcaaattggcatttctatatgtcctattttgtcatttattaccatgcatcaccaacgcctggtccatgagctccttgttaaggtcaactgtttctgtaggtttccccagcctacacagtgttttttatcctgttggtttgtttgtttaatcccagtttttccatttatttccttaaagtataagcctaggggacatttatagcctggctgagaaaagtctaaatacatacatacatacatacatacatacatacatacatacatacatacatatcttattttacataccaatcccagttccctccatctcctcccaccatctccccatcccacccctcatccattccccagggagggtgtgaggtctcccatggggaatcatctatgtctgtcacatcatttggggcaggaccaaggccctcacccccgtatctaggctgagcaaagtatccctccatagggaatgggctccaaaaagctagttaatgcactagggataaatactggttccactgccagaacccccatagactgccaaagccccccaactgacacccacgttcaagggtcttatgtaggttccctagctgtcagtctggagtccgtgagctctcacttgttcaggtcagctgtttctgtgggtttcttcagcatggtcttgacccctttgctcatcactcctccctctctacaactggattccaggagttcagtgcagtgcttagctgtgagtctctgcttctgcttccatcagctactggatgaaggctctatgatggcatttaaggtagtcatcaatctcattccaggggaagagcatttaagataccctctccactattgctaaatttcttagttggggtcatctttgtgaactcctgggaatttccctagtgccaggtttcctcattaatcccataatagctccctttatctttccttgctctccctttctgtccttccctaactagaccttcatgatcccctatgttctcctccccctctccttcttctctcccctctcctacctccccccatgctcccaatgcactcaggacatcttgtccctttccctttctcaggggtccatgtatgtccctcttagggtcctccttatttcctagcttctctggggttgtgaattgtaggctggtaatcctttgctttatgtctaatgtccacttgtaagttaagtacataccgtgtttttctttctgtgtctgggttacctcactcaagatggtttcttctagttctatccatttgcctgcgatttttttttcccccgctgagtagtactccattgtgtatatgtaccatgttttctttattcattcttctgttgagggtcatctaggttgcttccaggttctggctattacaaataatgttgctaggaacatagttgaacagctgtccttgtggtatgagtgtgcatcctttgggtatatgcccaagagtggaattggtgggtcttgcctttccatttcccagtgagcccagcatggcttgcttcaacttgttcccagaactctttttgccattcttaaaatcactcaatagcatacaacaaatacactctagaaacctttggctcagaatcatgatacaatgtttaaggcaaacagaaacaagaagtgaatcatccagggacacaaagtgaaaggcaagctgaaattattgtcaatgtatttggcttctaaagttgaggaagttgctgtgctggctagttttatgtcagcttgaccaaagatacagtcatcaacagaggaggtagcctctattgagaaaatgcctccataagatcaagctccaggcaagctggtaagacatttccttaattagtgcttgatggggaaaggctcagcccattatgggtggggccacttctgggcttggtggtcctaggttctataagagagcaggctgagcaagccaagaggaataagccagtaagcagcatccctccatggcctctgcgtcagctcctgccctatatgagtacctgtcctgatttcctccaatgatgaacagtgtcatggaagtgtaagccaaacaaatcctttcttccccaatttgttttggttctgtgtttcatcacagcaatagtaaccccaagacagttgcttttcaaaatccaaagtgcaaatgggttggggagatggctcagtgagtccaagtgcctgttgagcaagcctgaagccatggtagcaacccaggctcctacagtgagatgggaggcagatgcctcagaatctgttactgatttttgttgtcgtttgcttttttttggtctgtttgtttgtttttaaatctagacaagttcttcctctggagcttatgctgccatcatattcagagcaattttcccaactcagtatcccaaatgctgaaattatagccccaagccaccagcccagcttcagctttttaactgttatagtccataatataaccttttctgtagggattattttaaactctttaattaattagtcatggtaagaactcactatgtagtcctagctggtctggagactcaatatgtagaccaggctggtctcaaactcataaagatctaactgtctctatctcctgagtgttgggattaaagctgtgcgataccatgcctgtctcattctcatttttggtgttgggtttgatggagggcatcatgtattctaagtctgatgtctgccactgcaggtcttgttgacccaaagttccttttgacttataaaaatgcaacattctgagttggacatggtggtgcactcttgtgatcccagcattgcaagatggaggttgggggatcaggagttcaaagcctgcctgggcaacatgagagccagtgggagagctagggacagctgatgtttagtgtgttctcactggtgagttctatgttgctttgtatgtggaaaatatgtagagatatttttcataaaaatactggctatagtgacatgtttctccaaatattccaaagcagctttaatttgagaaatttctatggtgtccaagaagtttaacatcatactcttcttcagacccaaggaaggactaaatgtacaaacctagataaaactaagctgagtatgtggcagctacttctaaacctcaggctcttcacccaggactcctggcaaggaggctctaattaaaaaaaaaaaaaaatcactaaaccgggcggtggtggcacacgcctttaatcccagcattcgggaggcagaggcaggtggatctctgtgagttcgaggccagcctagtctacagagagagctccaggacaggctccaaaacaatacagagaaaccctgtctcaaacaacaacaaaaaaaatcattgagctttatgtagccttaaatttttattccactcttaggaaaggaaatttcagattttataaactacctccctatctctgagtacaatttatgatttttttttttagtttttcctaattcacactgactagctgttcttatacactggtgtccaggcacctggacatggaagctttgctttagtcaaccacagaacagaggggtctcctcaactccagcctctcaccagctctttggttcttgaccagtttttctggtttcatatagcatattgaattttcttagggattctttgaagaataagtactagttttcaggtgaaacggttcactggtttcccttcattttgcactaaagagtgaaatacaagccactccttcctttgcccgagtgactgcagagcgtccaagccactgctcactcagcactgaggctcaacatccctaagcaaccccctccccgccagcctgccatgaacttccaggccattagcttttcatttcagatggatgtgacagctgctatctaaagttccctccacatgaaacactttctgatcgtctctgcctgctttacacagaaaagcattttttataatacttttccaccaaaaggtggcactcataactttacttaatgattcccctatagttagcttcacatggtattcaaaagtacctgtgatatttagatgagacagctgatattaagagcatctaaggcaaaaaggattcggcatttccagcctttcacatagtactctcctgttggattactggctcttaggtccaaacagtgtcttcttcaaaaaaaaaaaaacagaaacaaaagtctatttatttgtatatgagaaagtgtgtgtgtgtgtgtgtgtgtgtgtgtgtgtgtgtgtgtacccatatacacagcattcatgtggttagagaacaagccacataagttggttttcttttccctttccaccatgtggtccctggggatcaaactcaggtcatcaagctgggtggcaagctcctctttaattggcccatcgagccaactcccagcatcttctttcaattctctatacctgtttttactctgccacaaaaacacggtgagtggaagatatgagaaaagggtaggggtatatctaaaatacatttttaaaattcttgtttttgaaaattaaagtatctgtatcatcctccccaccttttctccctccaactccttgccctacttcttgcccccttccaaattcatgacctcttttttttctttgttacacacacacacacacacacacacacacacacacacacacacacacacacacacggtgactctgtttagtgctgttggtgtgtctctgactttaagactgatcgctttgtgttaaataacaaatgagggggaaaactacttgcctgtcattctctgtctgggggtggagccacatgagaaatttccccttccatgttagcatatctattggtgttgtctttgctcatcttgtgtttaggcagccatattgttgaggtatcatgggtgtggcttccctgtcatttccaggagacacattctcatggttctcttgttgttcttaaagcctttgtgcccatcttccttaatgttccccagctttagttaggttcaagaggtggctttgtagatgtgtttttcactgaccctgggcacccatggtctcttgttctctgcgtgttgacaagttgtggttttcttcagtggtcttcatctgccataaagaaaagctgcattggtgaggggtgagagctgcacacagctggggtgtaagcatacctgtttagaatgcagttagggattgtgctggtttagtaaagtggtagttgtaggttctccaggatttcactagccctgtgtagttgtctaggtttctactgtcagcgtggtttccttcctgttgggtaggccttcagtccaattaaacagttgttgcttacctctagggtatgaatgtcacaatgaaagagccccggaggctcaggaccccaggatctcggtccaggactgcaacgaccccaatcaccaggtggaggggaaagcttgatgcatacagcatgaggctttattgtagttgtttaatgagctaaccccatgttagcacgtgcctttcatccatccaccatggagattggctaggaaagacggcgtgaagccacgacatagagatcttatagggcagtgtaaggggagtgtctaagggtatgcccaggttcaggattggtgtgtctccaggcttgccctgtgttgattggtcaactggttgttatggcctataggccctcccagggtggttgctatgctctgtacatcattgctgtgcacttgtccgtaaagcacacccagagccggaaagcatagcaccaccagctaacttctgattggttccttgccacgaggcaggcatctgatctcctagtgaccaaggcaaggtcaggcaagcatgcgttactgtcatggctgccaaaatggggagctggtccttcaactatttatttttttaaagtccctttctacaggggagaggatgacttgtgtgtgaattgcctgggctgaagggcagacttctatttggaacaaatctcctgagcatttattacagagccacttgataaagatacagttctttagagtccttgtgggatgccaaatccagaccctgctgtctagtgtctgatttagctgagataaggcaggcacacagtgtgagccctgcagtaactttccatgcacagtaggtgcaaagtaagtgcacagtaggtgtgtgggttggtcttaggtcatgtgagcatgtgaagtagtatgaaatgaggttgtttttttcttagattttcaagacagggtttctctgtgtagccctaactgtcctggaactcattctgtagaccaggctggcctggaactcacaaagatccacctgcccctgcctccctgagtattaggattaaaggtgtgtgctaacaccacctggcttcgtttttttttcaggatctctgggtgtgggtgtgtgtccgtccatttgtgtctctgtgtgtctgtctgtctgtgtctgtgtgtgtgtgtgtatgagtacccgaggaagtcagaataaggtgtgaggtcccccagagctggtgtgttttaggcaattgtaagctgttcagtgtggatgctgggaactgaaccagcccctggaaagagcagaactgttttgtctctagcccctgcagtaagagtttgctggaggaagatcattctttcatcagtgtttattgaacatcattttcccttttttttcatcagtgttcttggcacagaaaataaagttaagaacaaagtggacaagaactttgctttcagggacagccttttaggaacctttatattgaaaagtccaccatatgaggatctgaaatagtgtccagcacaaggaccttgtgtggaaagccccagcatgacaattggcttgatattgttcaagaatggcctaggcagctgaaggatagtagaagtaggtataaaaggccacaggagtgggactgagatggccttgacaaagagttgggcaggtggctttgggaaggcttgtagaattggactagttgaataatgggtaggattggaatgatacactttgtgtgacttcctcaccactcaaaatatctgcagttttaatcctcatttagcagatgacagagcaagcagcacagcgggaccatataatgagtggtgacaacaattttcaaagtgccatgttcattttcttgttcggaagtaaaaagcgtcatccaggcaatgatggtgcacgaagaggcaggtggatctctgtgagttcaagaccagcctgatctatagagtgagttccagggcaggtagggctacacagagaaaccctgcttgaaaaacaaacaaacagcaataataaaagtgtaaagtatgctagttctttggtttcagaagtcaataaagctaatgagtagtagcttttgcctgaggaaaagcagagagaggcaaaaacaatgttgggggacagctgcaaggtgtcttggttgttgtcagacatatggggttttttgtttgtttgtttgtttgtttttgcatttaattaaagcccccagtttagccagtcagtgtctgtctcccctaccccacctgtctccctcactggtgatttagcatagggcctcaaacttgccaggcaagcactctacccaagtctatgcccccatcccaagagtttgctctttcgacggtcagtcctgaggacactaacatactcaaagagcagttctatttgcaaaggaaacctgtggctccttgacacaggccgaccccattccaaactctccaccagtcactgttagcccattggacaggtgacgctctatcctcagcttcagccataatatgagggagtggtgggatatatttcagggggtgcagactggaaggcaaagcattgtgaatgagacagagagactattgctcacttccctttccttgcttgcttcctggagtaccggaacattgacccatttgcagttgactcagccttgcaaacaggaacattagtcattaagaatgctcttcaagtggtgcctgcaagataatggtagagcttctagcagctgtgtagattcagggcaggactgatgccatgacaacagcagaaagttgctgtggagatagtgtggtctttgtctgactcagtatttgataatattagaaaaaatgtattattctagccgtgattgtggcagtcataattttaaaatatctttcctttgatatgcatattggtttgatcatgagcctgagctttgttttataattgcttaattcagcatgaaagggtttggtaagtgaagcgtgtatttaaaaataagtcatcataaactaatctgtatgttttcttacaatttcaaaagttcccccttgttattgctgggcaatgggctccttatatttcttcacaatttttttctttggttttttgtttgcttgtttgtttgttttactagccaaattccccttagttaaaccagatctgtttgttggtcctgagccgttaagcaaaaagcctgccttttgttagagccaagctgttacttttgttcctgtaaagatcctagatgaactaggactatgttcaacttgtggtcagtatctgctaaatgctgaacgaatgaaccctaggaccatgactgcttaaagtatggttagtgtttggtaaatactgaatgaacaagtgaaaacctaaagagcccagccctgactcttttctttgtctttgcagcggagcccagggggagtatgctggactggctactatcagagcatacttagaccagaaaggagagaggcacagaacggtgagcatggcaggtggcactttgctccctgtgggtggtcgcacgctcaatcacagggtgccttttgttccttgggatctgcctttccagtcttcttggaagtggacagagaaacaaatcaagaagcacatttctgtgtttccttgcctccaggacatcccatgcaatctttgtgaggggaaacctcagagataaaaggcttttgtgcaaacccagcttatggaggcagccaactggccttggaagtgctctctagggagcacagggaggcaggcagcaggattgttgtcattcttgccctcctcattggctcaaccctagccctgggcctaagaccgtaacaattttgagcctaagcatcctcaaaagatacccagtgaagaaatatgatccccatgggattgctcttaactctaaacaaccacgatagggagcagtggcatttctgctatgccacttgctttgagcatgggagtcaagtttgctaaagtgactcactcctcagatttcctggggaccagctgatgctaccgggtaccattagtgtcccagaaagatgtattgtgatctaaccaaagcctctagttatggccaaaagaggcctcagttcctggtccctccattttggaggtcagctctgtgctagggtttctagaatgctgtggagctgcaattcttagaggggttttagggagggtgggtgtcaggagcaggacaaaggccccagctgttccggaaacttccagaaggttcctactacctgagtgagtactaccagtgattcgtaggccaagctcaggtcctttctgagtttattgaagctgaaagggtgttctggctagtctggatttttcagtgaagacttttgaaactttcacttcctccttggaaaaaagtggagaaggaacattgactcccagtgtcttcccattgggaatagaattctttttttttttcctttttggtgctggtgattgaactcaagcctttccgacaccagggcaatactgtatacattaccaacagtttttgttttgtttatttactattattgtcacagacatatagcctgggctggcctcatactctctgtcctattgagaatgccttgaactcctcactcaaccacctgtctccaccttccaggtgctgagattatcttcctgagcccatgcctagctggttttggtatttcgaaagttcaggctggccttgtacttgcaaatgttttgcctcagtagcctaagtgctgggttcacaaatgtgtcctaacataactgtcattgaactgacttaacaatcattgaaacaagccatttatgaatccagaaattactggaccctgagcatgcacagggactatgtgtttcctgagatctgatgatacagtagacagacattggaatttggatttgttcaatcagttttcttgggatcataatctcttaactgtatgagaaatgttcttgagacctgagagacgcatagaatcagaagagaactgtggagctgagatgtccagtgagggaacaccagataaggaaccactcctggttcctccatggttcccaaatacccatatgccttggagctccttgtcattgactcttccactgttgtttgtttgggtcttgcaggtcgtactgtgagacagagaagccatcaaagcaatggcttcctaatgctgcgaccctttaatgcagttcctcatgttgtggtgacctccaatcataaagttatttcgtggttacttcataactgtaattttgcaactgttatgaattgcaatataaatatttctcagagataaggtttgccaaagaggtctcagcgcacaggttaagaaccactccaccaaacccccacactggcagtgtctgtggaaggcccatgactaagcaatgctaaagggccagacagaattcagattcactctgcccaagcctcaatatgtacctaactctgcattctgatacctggaaataagtttctttgctataggagttggggaccaagtcagaaactccaaattagagatcttctgaattgggtagacctggatctctggtgattggctttctatggctctcgcttcctctctgagcatcccagtctccttctctgctccccatgccctggatgttatatcttccctggcaccgctgcgcacactgtcatcacagaaggctgagaggacattccattaggaagtgtatggttctgcacttctggacagtaagaggagaaaggcagggaagcccccccagccactgagctcagaaacatgacggaactcaccagtctggaaacaaacattggcttccttctggacaagcagttttaatttaagcccttttttagagaagaaaagaatgacttattattcaaatagccaaggaagattttccacattagtgatgtctaaggcagctgctcccacacaataggctcaaatggagctcggttaaacatacccttctcttttgaaaaggagttggagacagtatgtgcagaaaaaccataaaacaaaactgcctaggttactgatggttctctgccttcaagctgcttttagaagttatttcacttttgctctttggtcaagtttcagaggctcctgaaatagaatgcccaagttcatgattcatagtttaatttgggaaaatgaattatttagcaatctccatgtgccaggcacaaagcattttacagctcatctctcactttgctggtcaaatctcaactcaagtgtcctgactcgtatagaaagggaaaacattgacctctcacagtacacacctacacctctttgttacttttgagacccgtttctcttcttaaatgcctgaggcagtcatagcctttaattgtcaggttttaatccctggcaaaacacagaagttttaacttggcatacattcagttctttgaggatgaaatctgtagttctacaccaggtttcctggaaattaggacatagcttcctcctacaggatataagcataccatagttggattcaccttagacgctaaggcttggagaaaccagtacatcaaatctgagttctaatacttctgtgtctgacataacatatatgattttaaagagaggtaaaagtaacactgtgaaagtaatgtaaggtccgcagatttccccaaacacaagcatgtctacagtgaaagtaacttgaagtccttagatctcctcagaacacaaaagtttctactgggaaagtaacttaaagtcattagatctccccagaacacaagagtgtctacagtgcctctctccattgttccagggtcggattgatttttccatggctgctctagcaaatgactgtaaactcaatgtctcgtgacagcattcagggactgtcctacagttagaggccagagtcagaaactgtcctcatgatgttgacagagcgctttccttagaccgagctagggaggacctgttgcctttcctagttcctgcaggccaccttccctcctgagctcatgtcctcttcttgctattgcacaaaattcttgctttgtccatcgcagctcctccctctatggccagatccctatgatggacacttgtgtgcacacttaggaatagccgaaagttcaaactcagagtaatcctctagcctccaggtccttctgtcttctctgccatagatgctgaccctgggttgttccaaggccttggtcaagagaacctgggagatcattacttgcctgaacacaggacagttgacattttcagctcttattattattttttttttggtaaccccctttgtgggaattcttaattttgtcccattaggaatattttatattcatttgtaagattctcctttcctcttcttttttaaaatttttcatttttttctttcctattctttatcaatatcctgtcctaaagtgttgctttcatcctaggatgtagtataaaaataacttgtgagaaaggataatgcctccagcgttggtcctgataaatgaaggaaaaaagaatttaaccacataaaagaagtgtttgaaaaagaaaaaaggattgaggaaaattgagcatacacagtggatgactaatagctatttaaaaggagcttagtcagttagcacgaggttgacaactaattttatttgccctttgcttaaagttctggatggtgatggtgtgtgtgtgtgtgtgtgtgtgtgtgtgtgtgtgtgtgtgctcgagcatgcctgcacatgcacatcctggagctaggaaggtaacagaactaaggccctcctcaagagcagtacacactcttaacttctaagccctctatccagcccctcccccattttatgtgagcgcattggtgtatttgagtttgtgtttgtgtgtttatctatgtgtgtttgtatatgggtttgtatgggggtagttgtgtgtgtttgcacacgcctttttcttaagttgaccattgttttggaagaatcagctggaagccacatttttttccttcagaagcccatttttataaccaatctccagaggagttgccatactggttctgagattttcaaggtaggctcgcatcacttgagttctgttggggaacttctgccctgttgtgtcttattatggttctccttgagatctgtaaactgcaagtttcctgtattcacaccatgtggaggaaaggaactaagaacctgggcttgcagcactgttcctaccatctgcccaatgctcatcaaaatcctttgtggggctacagctcagtggtagagcacttggcttgcctggcatgcatgagatgcctactccctctactccagtaaaaacagatagatgcaaaacatcttcatctcagtactgaaatccaaaaacaaaatccaacagatcttttagtttagtgtcatctgtattcttgagacacagtcccttgatttcttccactgaagctgtgtcccattttgtcagttgcctactgtactgtggatagtaggcatttatttctctgtgtgctagtgttaataatggatgggtcatgtgagcacaggcaggtgtccacccatcatggtccatccggggtttgagattctcacacaaatcattcacagcggagtaagcacccagggagtgctggcacagttgtgttgatctggagagccctggggtatgtctgtcattgtcatctatctgtcctggttcagccaagagcaccatagaagctatgatgtgggcattggagtcctacagtgcaacttctgaacttgtgttcttaaagattctttccatatattacatctaagacaaggttagaaaaggcaaggctatctttagtggtctggctgaggggaagacattctgatatcttgtatatactctgtatgagggtgtgggatattctggagctggaaatacagacagttgtgagctgccatgtggatgctgggaattaaacccaggtcctttggaagagcagccagtgctcttaaccgctgagttatctctccaggcctgacattctgatatctttaggcaagtatttggggattcaaagggcactagtggccagtgaaaacatgtggcgcctaatttttgtcacagacatgttaggagactttctctaatttgaaataccctggtgattttttttccttctccttttctgcttcctttctttgtgttcccaaggtttgtctcattcctaagtcagcacatggaacgaatccagcaagtgcctacatggcaggcatggagatccagcctgtggaggtggacagatacgggaacattgatgccgctcacctcaaggccatggtactcactcactctccccttcacagattggagccgtctgggctggcaagacacaggtggtggtgatggggcacagggagtatatggatggtgtaaacattgccttctcttgtatgttattgaaagacaacaattcctcctctgaatgggtctgtgggaaagagtacaaaatccaaaaaaaaaaacccaaaaaacaaaaaacaaccaaccaaccaaacaaacaaacaaacaaaaaccctaacaatctttaagggaaagagaaaaataaaaagcaattgtattttgggtccccatttaaaactggccgtgtctactctccccctcactccctggcagagaagggtcttttcactgggcccttcataccctgattcttccacttgaaatacaacgagcgatgtattcactgtgataccttcataagaagcctccactggctgtcctcatagtcctccatttccagtcacacagacagtcatggatgttgggaattaaagtaagcatgacacattcccatttttgtaaatgtcccagccgtgctgtactggatcccaggcaacattctaccctgtttcctccaacaccaacccccactcccagcctcccaacctccaggaagaggttgcttagcaacagtatctgttttccaccagtggactagaggctgcatgttaagtggtagggaaatcggtagaatagcgatgtgactgtgtcagggttattaggcacgggtactgaaaacctacgtaaaagccttcaaaagggcgctgaaatgtaacagccctgcacatcttttccattcccctctttccattgccttctctttttaaccacaaatattctgggtcgtttactgtagttattaggattgtccaatatagaatatgtggactatgacttgatttttcttccacatcaccctgctctgacttgctaggcaagaaaaaaaaaaaaaaaaaaaaaaaaacccaaacctagaaattattctttatttgtccaattgcttttttgggagataacagtgagagaagtacgtgtactgaggtagttctcaacccactgaggtgggtcacaaccccttagagggggcaaacaacccattcacaggcttgcctaaagatcacctgtacacagatatttacattacgttggttgttaaaagcagcaaaattacttatgaaatagtagtgaaaataattttatggttgggggtcaccacaacatgaggaactgtgtattaaagggtcactggcatagtggcacatacctgtatcaccaacacttcacagaagagtcagaagtctaaagccatccttggttacatgtaggtaggaagccagtctgagctgcctaagatcctgtctccaaaacacaacaatgtgggggagatttttataggaagtgtaacacttccaggagtctgtgagagggagggtaagtgagaaagtatacaccaaaaacaaacaaacaaacaagaacaaacggaaaagctagctggaagattagccatgtacagagatacctccccacacctgcccaatagcctggaataatttttgaggtggcttgaaccaaagcagaaccattttacaggactggacccaaaatatccaaaaagctcctgagcagcctcttgctttttgtttaatttatgttgagacacagtcccatgtatcccattctagcctcagagttgctgtgtagccaaggataccccctccctccccaatgccatggttatgggagtgttccactatgcctagttttttatttggtacagggagaaagcctagggctttgcacatgctagctagacccttatcaactgagccacagcaaagctggatttctttatctggaccacagaatcctgagaggacttgcggctgctttgggatgatttctgaaggagcagttgactgtgcattttaagcactgttgtagactgagatgttgtcaacaattcaaacacagagactttgcatttcctagccctttaaaataaaaaagcagtcttggctgagaaaggatcacttgctctcatcactattctccccacaggtggataaacacaaggagaacctggccgccatcatgatcacgtatccatctaccaatggtgtgtttgaagagaacatcagcgatgtgtgtgcccttattcaccaacacggaggccaggtctacctggacggggcaaatatgaatgcccaggtgaagacacttattcctactgagaaaatggataatgatattttatttatttattgttaatttttaaaatattgattactttatgagtgttttgcctgaatgtatgtatgcgcaccagtgtgcttggagctcactgacgtcaaaagcagacatcagatcccctggaactagagctcacacatggtggtgaaacaccatgtgggtgcctggacctgaactcaggtcccctgcaagagcagtaaggatctttacttcggagccatcattctagccctgtttggttttgttttgttttgctttggtttggtttttgaagcaaggccctaagcttatcctcagcaaggaaaacaattctctcttggcttcttgagagtcctctttgacacgagacactgaattcagaaccaaggttctgttctttcccttttccttttctgtgtgatgctggggatcaaatccaaggctgtatgtaagtgattctgtgaggccatcaagttgactttgctgccagcctttcataggccaaatcagttccaatagggattatagatcctagaggaggtaatggggtgaacagggtacaaaagttgaaacaaagcagcgctagggacaaacatgcttatgttgtcaggagtgccgttcctctgaggacatacctgggccaggtctcctgatttccctagctgatgaagtttagaaccaagtactagccatgctagatgccaaactcccatggacctggagttttaacttcactgggaccccaagggattcaatcctgcctactccaggttgcaggagtgaccgagagtctatgtaatgtgagcacctgccccttacttctctccttctttagtgattctattcataagtgtcattctggaattgccttctgctttggcagcctaaagcaaacatatctgtccacagtcaaagtggcggggttaccacttgaatactgtagctgggtatctggattgtctcaggaaaactggtagccccattcccactttctcagtttggcatcctctagaccagtcacgacctttcaggggttgaacaatccttttgcagggttcccaaatcagatatttctattataattcataacagtagcaaaattacagttatgaagtagcaatgaaaataattgtatggttggggtcaccacagcatgaggagctgtatgaaaagggacagcatcaggaaggttgagaaccagggctttaggcactttcaaggggccatgtagccaagcacataataaacacccagccttgaatttgcctgagaatgtggtgccaaagcagcctcctgttcaatagtaacttcagggttagtggcatttcctctcctccctctttggtttttcgagatcgagtttctctgtggctttggaggctgtcctggaactagctcttgtagaccaggctggtcttgaactcacagagatccgcctgcctctgcctcccgagtgctgggattaaatttgtgcaccaccaccgctcagccctctcttttctcttaaggtagacatttaggtacagactacccaagtatgtattttaaatggagctacatggtcagttgctgtttccatagaaaccacagtcactttgcctgggagatgtcaggttgactgcagaacctataggaatccttattgatattttaaaattacaccgtgtgtctgcacaagcggatgtcaaaggacaacttgtaggagtcagttctcttctgttcgttcattgtgtgtgtgtcctgtcgatcgaactcaggttgtcaaacacctttatccactgagccatttcactccctaggaagccttttctgtgatcattatggatgtggctctgcctgctttcctgggaagacaaacatcacagaacagtttgcccttccctcatcaggagggaccttgccaagctctgatgtttactcttctctttccctttggggtaggtgggcatctgccgtcctggagactttgggtctgatgtctctcacctaaatcttcacaagaccttctgcattccccatggaggtggcggccctggcatggggcctattggagtgtaagtcgtgggctgctggctgaaggatcctttcagaagcaggatggccctaaccatgttgttcttcccatctgggtcttcaagtatggagaatattttataggcagtgtgccctccccacagctggatgcagagcagggcaagcagcatttttagagtgtgtccaaagaaagcacaattgtcttagtaaccccactgtgtgtgtgtgtgtgtgtgtgtgtgtgtgtgtgtgtcctgcctcgctgagctctagagtaagcttgtcaacagtcatgagcaggaacttttctagtgtgagaggtcagaactaaagtgtgagctcctgtgtcacagatttgcacctagatttccaagagctttataaaaacatatgtattttcctcatttcctagaacatgagtagctggtaatattgagagtaaattggatggaaggcacttaactccttacagctttaatttttattacatctgtgataagtaaggaggaaacaaactttattgctagagataattggatgaagtcactgtttactgaaggaatatttcttagcagttgatagcatcctctctacagtaagaacagccttacccagaacatctggagtttcctttctttttgatttttattttttccagacacggtttctctatataacagccctggctatcctgaaactcacactgtagtccaggttggcctcaaactctcaagagatctgactgcctctgccttccgagtgctggggttgaaggtgtgtgccaccacggcctggctgttctggagttttcgggatgtgtggtggtggtcagggaagggcagtgttcagggttgctgggagcctgactttcttgcttctcctttgatttgtattatgagtgggtgttctgggtggttcagagggtgtgtaatggtatggtgttaatgtgttagcctccaagtggagtgtccaaggcatctctttggcagccttctctacccagtagacagctttagaaggatgtggaggctgctatgagagacctctgtaggcctgcctctgagaagtcctccaccacagttcttggaagctgttaggtggcagaaaagggaggaaggaatctagagatctctccttagttgtttccttgttgtctgtctcccaagaagtgtcaagtccctacaaccatcagcttgcccctactgagattagagttcctagagtaccacccatttagttcaattgtatctttttgcatcatttcaatgtgtactttaaaaccaacacaggaagaagcatctggctccttttctgcccagtcatcccattgtttccataaaaccgaatgaggacacctggccggtggggactgtcagtgccgccccatggggctccagttccatcttgcccatttcatgggcttatattaaggtgaggcctgtgaacttgtgttgctatgggacttgagactttctcagagggttaaaaatgaaggagtctgtgacttgagagtaggattcagtgaacactgctggtgactggggtcactgccagtactggggtggaagaaatcctgtagaagaccagctaaaattgtttcatctgttcctttgggttctcgtgatgggtttacatttttccagacacaattaagtcccatgagtcatgtgaatgtactggccacaatatgtggtttcctgtcagcctcagacagagagccacacaagcgaaaagccgtgcacatagtcattatgacactttgctgagaccctggcgaacatgttagggggcatttcacttcacattgtgtgtcttgtcagctcggaggatgagaagagaagcaacgggaatttgtttgggggtggtttccaaagcgctgcacttcagggcctagggaactgtgttttcaggggtaattgggctttgtcagagaacaggctcccccctcccctttgtctttctccacagaaacactcaagccagaactgattttatgcagcttgttaagactggcctgccacctcctagaatgtcaagactggataggcacagttgctaattaaagaagctttttcaagccgatggcctttgttaaaggaagggtggccgctgctcagacaaccccaaactaagctacacaaattgttctgggtgactgcagagctagccggctattagtgaattcagtgacatttatgattcttcatttttttaaaagtgcattttctgttttgagccacagcctccttatactgtttcatctggacacaagtataggactataggcatgaatgggtcgccatagctaactggcatttatgattcctctttagatgagatcttgagacattgtttattgtatgtgtatgggtgttttgcctgttatatctgtgcacaccgtatctatgcagtggctgttgggtgcatcagatcccctgggattggaattatggataggtatgagctaccacatgggccctggaaattgaactttactgctgagccatccctccggccccatgattctgtttttgtttatgtttttttcccttcctagttttgtttctgagattgggtcacatgtataaaagctgtctttgagcagctaatctagccatctatattgcccaagtgctagctttgcaggcgtgtgtctccatgcacagccagcaccatttgtgattgtagtgaaaagtttcttggaagcaagagcagcagttctgtacctcggagctttgaagcttcctttaaaacatcaggcaagttgtttgcaaactagaggaacaaaaacaatgagaaagaaaaatctgcttctttgcaaacagccaaatccccagttccctttgatccatgagttacataaatatggattatttgtccaaacatttgggccagagatggcttcttacatatagaaaataaaggcccctaaggctgttttggccatatgcctagaacacagaacagagcaagagttttaaaacaaaataaatagtgtttattttagccttatttcaggctgttacttctcccctagacactagttggagcctcctcctcctctaatgcactgtggaaactctctaaggatagtctctccctgccccccacacgcctcctgacttcccaccatcttcactacctggtctcaccagcatgtgctcccactccactgagaataaaatccaactgatggggacgtgtgcttagagcatttagagactgatgctcggtaaccgacacgtagcatgacaagaagcagtgggctggacctagcccatgtcaaagcaaaggcttagaacatgaggtcccaacccatgttgctatggtgacttccagatgacagtcatgtgcctttcccacacttgtgccgtggtcagtcctctcttttggcacgattcccctttccctttagaaatacagcctccactcatggactcactttcaaggtcatggtagagttcagctttgtctttagaaagcctactttgactaacctggggccacgttgttctctctttgctttggactttgtagcactgttttattcagttaagtacttggatgtgaggtcactcagtcatgaacgttggtgtaatcttgactttaaaccctttgctcttggtgacgtttatcctggatgacagcagggaactcaaccaccagcatgagaagagattgaatctggcagttggcaaacatgacatgaataatgtttatgttccccactgcagacaatggaatggcaaaccacacaacattgatgtgatggattttgaccaagctctcaacagattccccagaagtttcatcattacatctcaaattcatagtaaacacaaaaataaacattgcaactcttctagcctaaagaacagtgctttttcctcttcaggtagcagtggtatgcagacagctgagccctgctgtaggctctgttatatgacctctacccacccacacacaccccaaaacaaataaaattagtgcttaaagaacaaaaattctttcagcatggaggagactgacacatctccttcctggaatttccattcattttcaatctacagtggcagtgaactcttttggttattgtttgtttgtttgtttgtttgtttgtttttctgatacaggatttctctgtgtatccttggctgtcctggaactcgctctgtagaccaggctgacctcaaactcagagatctgcctcccattgcctcccaagtgctgagattaaaggtgtgcgccaccaatgcccggcctggtgagctcttttgagtgaatttaactgggggcatctgcttagtgtcttgaccattcacctcacccagtcaatggttgatagctctttttctctttgttgcagatgatgggaagcaagggtctcaaagaggccacagaaattgctattttaaatgccaactacatggccaagcgattagaaaaacactacagagtcctttttaggggtgcaagaggcaagtatcaactctttgattttctttttctttcttttctattttatttttgtccctgcaggcaaactatgcttgatgtaaatgtgattttgcaaggtgggggcggggggaggcttctatttcttagaatatacaaaggagagcgtagaattcttgggaaaatagccaacttactcattactgtacataggaccatcccagcctagtctacacagcctagttagcaaggggtctaaatcacagacagagatattcacataaacaccatgagctgatctttcacagagtgctgtagaagtgtctcggggagtgaaaccacttggactaggcagagtctgggtggaatagtttgataaagaaagcaactatttaatatgtgcaagcaagcatacaggagccagccaggtaaagaggaaggagttcctgtagcgtgtgcttgacttgaagtgggatacgaggagagggccccaatgagatgagcttggcaccttggagatcttggaagaatctagacttagaacccctgactcagaccatagcccttaaaggtttcccagcttgaggaatgacgtgattagattgattaaaaggctgaaattgtcaaggcgatgagttgaacgggttcttggaagtacaatcagttggacttagttactggttagtgcagtatgttaggtaaacatctagacttacattagagagtaaagccaacctagaagtgataggtgatggacgtaagaagcaggaagggggggcctagagaaggcttagcagttaatagcacattttgctgctcttccagaggacccgagccatgttcctagcacaaccacctgcaattctagttcctggagatccgatgccctcttctggcctctgaggtcacctgtaaagatgtggcacacacacacacacacacacacacacacacacacacactaaaaataaaaaagaaccaggtagatagtaagagatgtgtctgctctagttgtggaaggagaaacaaggaaaggacacttgagaaaggagagcaaagcgcctctagcagatagtggcatttaggatgatcagtggtacctgcttgggctcttggctcctccagcccagacagagtgtacatccacattgcctataatctctaaagtaaaggccgctctggccttataagtatggatccaagggagaacttcaggagttggcaaatagaaacaagtgaataaccagaagccctgggtagatgctcgccagagagtagagaagggtgtgaggaatatgctccaagcaacacagaaaaatgcttctgcaggcactaattagctcaaatatagctcctgtactgtggaatgaatcctgatgtgtgtttgctttaatgattagcttaaacatttattttgtctggttataaaagtgaaatatatggattgttcaattcagaagttttgggaaataaaaaagcatgagaaagaaaatctaaatacttgcatccatcagccagataaagctaccatttaatgctcggctatctcccttcctcattactcttgaacattagactaacatcacaaattcggtttggggattttttaatgtctctgtgtgagagagtgtacagtaagggaaggggactatgctcccttatgggcacatgtgggagccagaggttgtcatagaggtgcctcctgcagtagctcattcaccttatgttttgagacaaggtctctcagtggacctggagctcaccatttcagctatcagccaggttggctgactagcaagcctctggggtcaacccagctttacacacacagacacacacacacacacacacacacacacacacacacacacacacacgcccacgcgcgcaggcatgcacacacacatacccatcatctaatgtctttttacagcatttgcacactgagacatctacacagccccacaaaatagtatctattctatttttgtgagcattttctcaattgactaaatatgctttgaccttacagtgtggatgacattgtgtgactgccctgtgagtctagttatattctcaattgtttacattataacattgctacaagaacaacccttccagtagtttttttttctttcttttttaaagaaaaaaaatctgattatttctttaaataactgatagaaaagggtatggatgctttaaactttttacacatgtgtcctcaattatttccccagatacactgtgctaattattttatgctagtagcattgagagtgaccacaccaagagtctatcgagaatagactgaaaaaacaacaaaagttaaaaaaaaaacctttgccaatttcatgaatgaaagatattattgttttgatttataatacttaagttgaagtttttctttgatttctttattatttattgatagtagtactaggtttcaaacctagggcttcatgcttgctaggcatgcgctctaccaatgagctgtctcagtccttgattttttttttttatgtttaacttttggcagcataactgaggtagaattaataaacctttcatacaatttgctcatttaagctgcataattcaacagcttttaatatgtccactgactgcaaagtctagatttaaaagaaggaaataatgacttaaactgaatgggggcgactggcacccatgagagaaggtcagatgtcaccatgcacttagcatttatgtagtgagtggctttgggcacaaagccccaccccatcctgtgggacttaaaagtacaaaaagatggatgaaatttccatttgttttgacagtttaccccagaattaaattgcaagtagcatttctcatcccaaactgaaatgaatggtgattatagactagatttctcaatcttaaaattggtcaaaccaaacattgccccatattggcctgctaaatacatttgttacacaatttgaaatctcatattttagagcctgggaaaccagcaccattgtacctcctgggagtcaaaatagcaatgttttcaataatcacattgtattctaacgtgtccagcagcactagtggaagaccaatgctcgtcttaatcatatttactggcactaagtcagactttggaatgacagatgcctgcgaggcaatcattttaacgaactccaggcttaccagcatcagctgggtctctgagatttcaatgctgactaaactctctaggctaacggcttttgaagcaaacagacacgacaggcaagatttaggtagagaagctgcagaagtagttattcttctaggattattgttttgttggtggtgttggtctgtctcttttgttagatggtttgtaggattttttttttttgtgtgtgtgtgtgtgtgtgtgtgtgtgtgtgtgtgtgtgtgtgtgtgtgttttgtttgtgtgtttggttttttgtttgtttggttggtttggtttttcaagagaagatttctctgtgtagctttgaagcctgtcctggcagtctccctgtagaccagactggcctcgaactcacagagatccacctgcctctgcctcccaagtgctgggattaaaggtgtgtgcctccactgcctggctccctcctccctttttttaatatagtattttcattaattctaagagaactccatacatgcacatacaatgtattttgattgtatttactcccaattcctcctcccccaaatttaccctcatcttcctaccttttcccaacttggagtccctttttttcacaccaccctcccaattcaacaagtccaatttatgtgtaggtgtggtgccgcttgttcgtggtccacctaccagaggccacaccttcagactctcccccagaattggctcctgagctaggaatgctggccactgtgttctgtaggtctcgttcaggcaccctacagctgctgtgagttcacgatggtcctgtcatcttgagaagacgctgtgtttccacagtgactcttctgatctccccacctcctcccccttcccgttttatgctcctctgacttggtatcttcacactgttagccactgccctggttaggcctagaggaaacagcagctatcttagatttccccaacctaccatatgccacagtaaacctgtacatctttttcttgagtctgcaaagaaagaagagtatcttgggatccatctcctgatagccaccaagttgaaatgctatgtcttagagagagagggatgctcttgggatgagagtgtgcatgtagaaagtaacatctgaacctcatttttggaacagtgctcttcccaaaccacttgtctgtggtagtgggcctgcagatggaatcttgggtttagcggcgctgggctgggttgacttggtcagatggactttcagctattgccactgaacctctgcttgcaagattctcctctgagcctgccaacaaatgactattctgctgctgacgtacgttcccagccttgggctagccacaggcccttcggaacagtaaacatcactggtcatcttcttgccagggctgtagtgaccagggtagcagccagaagagaaacggcataggctgacactggactcttaagaatcctgaaattaggagtcaaaaaagtctcagggtttttgtgatttttttttcttcctcagactttctaatggttattccattgagcacatttttctaactttactcacccagaaatagacctttctagttttgagtctcattcttaaccagttcctttcttatcattgttagaaaccatatttttaaaaatagatagctttagtgtattaagtctcacacttatactcctgttttcagactaaagccatccttgctgtgtttattcattgtaaaagaagcagagtggttcagactgccttcaggggctgtcagtgactgggtttttttgtttgtttggttggttgttttttttttttttttggtgtttttgagacagggtttctctgggtagctttggagctttgtagaccaggctggcctcgaactcagagagatccacctgcctctgactccaaagtactgggatgaaaggcgagtgccaccactgcctggccaactggagttattttggaatgctggtttgtcagtggattcatcgttggcgcgagctgacaagacaggttatttggtttggtctgatgtacatgtttctgggccgtatgtgtatgctgtgagcatgtgagtgtgtgggcaggcatgcacgtgtaccgggaggtcacagcaggatgttgggtacctttctttgtcgcaccttgaggtgtttaggctgactagcctgtgagttcttgggttctactccatctccccccacacctgctaccacccttgctggaggatacaggcgtacattgctgtgcccagattttacatgggtgctggggatttgaacccagatcctcatagagtgagtattcttacccattggcccgtcttcctaagcttgtaaaaccaaataaagacacttatcaatgttgattgattattaaagctgacctactttcaccggtttattcatacagattttattttcattcttttaaattatgtatattgtatgtttctgggtgtgggttttgcagaatgcatttccctcagagaccagaaaagggcaacagattatctggagctggagtttagatagctttgatctgcctgacatgggtgctgtgaaccaaattcgggtcccctggaagaactggaaatgctcttgtccacttagccatctctcccgcctatcaccagtttagttagtagctcccgatgggtgtagaagagcagtctgtttacaaaatagattgaagtgaactgaccccatagatttcaatctcatggattgtttgacagtgccccccttctcccactttctttcctttctcttgtctctattctttcttgtgggattttgttttaagacaaagtcttgattaacagcctcaaatgtatggttctcctgcctctgcctagttcgaggactacaagtaggcaccaccgcatctggctagcagtgcttatttctaatacttggtctacagtctgaaatcaaaatatttgaacactcctttgaaaaatcatataaaagtatatatgtgttctgtgaatatgtgtgtattgacatttccttacggagaaagttatttaaccttgaaagtgaatactgatgaatgcacccatgaacctttagctctagagagaatttgtattaaaggatcaggattgtatttaaccgttccaagtagatttttaagtcttcagaagagaaattctggctatctcctgctacgtgttctagtaatgcccctacctcccttcatccaatgccagggtcactggtgtgcggtgaactgcaatcagatgtgcttgtgatagagtagctgaagtctttattgccaactatgaccttatcaagttctcgtagacgcttggtcccctgggctacagaaagagctgaattgcttagttgtccatttgagtgaaacaacaagctgatactcaacttcacctgacactgtgttcttgaacagggtacgtggctcatgaatttattttggacacaagacccttcaaaaagtctgccaatattgaggctgtggatgttgccaagaggctccaggattacggtaagtggcttttgacagtcgcacaattgttctaacaggctatggaccatttcctagaagcataaatggaggtacagtcacctggtaaactaaccaatggtgtaagtgggacagccttcaaaaccacaatgaaagactgactccccctgtggttacacactcctttctgccctgcaaaagatatccatgtgcatcttgtggaatgtcaaacagtcaagatgtctcgttaaaatttaaatcccagctgggcagtggtggtgcacgcctttaatctcagcacgtgggaggcagagacaggcagatctctgagtttgaagccagcctagtctacagagtgagtccaggaaagcctgggctataaagagaaactccatctaaaacaaaacaaaaaacagtaaatcccaaagaaaatgattgctattgctctttgcctaataacgtctcactcctctcctgggcctggtgaagagctcgtgaaaaggcaggctggtaggtgaggaggggactagagcaaaagcaagtcacctgcagaagtggagagccaggtgactctggggttgctgtatcagctgcttccgaacatgaaaagcaggcatgtattttgcacaaaaaaacagattcctttctctgaagaggtctaaacctcttctaggtattatggggttcatttatcaaggtcctggtttcagcttccactgtggatccttcagctctcagaaatgtgagggtgtcttgagtttttgcgtgtgtgtgtgtgtgtgtgtgtgtgtgtgtgtgtgtgtgtgtgtgtgtagtgtagtgtatgagtgtgtacaagttcttatgtgcacatgggtgtctatttgcacatgtgtacccatgcattcacagagtgtcttcctctattactatccacttgatttttccagacagtctctcactgaacctggagctcactgatttggctacactggctggccagcaagctccggggatccatttctctgccttcctcctagctctgggattacagacgagtactactctgcctgctggtgctggggaccagattcaagtcctcaggcatgcacatcaagtactttactcattggaccatttgtctatgaatagatgtggaatgctatctgaagctagtagctttttcttcccccacatgtttgcaatttgcctacatggatgtaagtgctgcacatgtgtgcctaggccagagtcggaagaaagtgtcagatcacctggaactgaagtctgaagttataagtgcttggttgtaagccaccatgtgggtactgcatgctgggaatcgaacctaggtcctctgcaagggcaggaagtgcttttaaccactgagtcatctttccagctccttaatgagttgttttaagaagaaatgtgcattggggaattctaaacagtttaccgatgcatcttcaagagaggcccacacatgactccccataaatggattatgctattgtgtagaatcacacacaatagacaggaatagcagagaaagtggttattaatgaaattaacagtcagttcctcactgtctcttcttggcagccctttgagctgacggcagcagtccctgccccttccttctggctcccctcctggccaggggttgagtaatgaccagttggggccagcacatgcatttcttagatatgctgtctagttatgtacctacttgcagcacattcataggaaaggagagaccaggaaaagtggccattgaagttactacccattattttcaagtcctaacatgctctagatgttaacacgattctgatgtttgatggaaagatttccaccctcgtccaaagcccagaagtgtccaggttcctagtacataacatgttttcataagtgacagtgactaaatagccatgtatactaagaaactgacaactggatcctcaggagaggcttggtcacctatacacttaggaagtacactgtgtagtagccttcacagcctttggggaaccctatcttgggaccaacatttcaaaattatcctagcttgccaggagtttctaaggcttatgttttaccttgggtacctctcttcctgagttagggtcaagatccaggattctgattctagaataatacgtgaatggttccagggatggatgattccagatgtgggagccactaaagtagactattaattaaatttgctcacacaaggtattgaggacagatttaaatgggtaattaaatcagtttatgcttttaaagaacaaaacaacttgtctctggttaggtcagctgtatgttgtcaaagcccattaaatggtttaactaagatgtgcatattacattgtaaggtttattacggaatactcgaatactgaattttagttactgatggacattctgaactgcttacaaaatgaagtgttctgatagttgcagtgttctttgaattacataaaaaaaaaaaaaaaataacactgggctggcattatggctcagtaggtaaagattcatgctgctaagcctggtagcctaagtctgtcctgggacccaaatggttgagagccaattcctagcgcgcgcgcgcacacacacacacacacacacacacacacacacacacacacacacacggtaagtacatataaacctattttaaaaataagacagatggaggtgtggcaaagcagacatcatctatgggggtatgtgggtatctgtaaacagtgctttgaaattacttgtgtacctgaatatttttattaaaataatgttggagagctggtcggttaagacgaggagggatgacaatagccccagggaatgataagacctgccagaacttgggaacctttgttctctggagcaagattctctgggaggtacatcaacaggggaaattgtgcttcatcttgaagtagtttcagagatggcgtaggaaatctacgtgaacatgagtaaggctgtggtttcgatctcttagtgctacacaccaaaaccgggcccacagatgtgtctgtgaaatgagggaaagctgtgttctttgctttggtccagaaaaatctctttgttccttcattttacaaataaaaacttacacagccacttcagatgtgtttctgctatgttcaggagaaggcagaagttctacacatactgaccaagccttagtttcttcacatggcaaatggggatagtgatttgcttgccttctcattaaattttgataggttgtttctcttcattgtaacacatcatcataaaaagggcgtttttcttctgttttttttttgaggtgcagtggtttgaatctaaagtcttgggtatgctcagcacatgctctgcagctgagtgtcaactttagaaagattctaaaacaccagtgaaatgaaaaccccactctaattttctcacaatagcctgttaaccctcgatacttgtccttgtaaaatgccatattaaaaaaaattatacatttatgtactttgacttacatgtattcctttgcaggatttcatgcccctaccatgtcctggcctgtggcagggactctcatgattgagcccactgagtcagaagacaaggcagagctggacagattctgtgatgctatgatcagcatccggcaagaaatcgctgatatagaggagggccgcattgaccctagggtcaaccccctgaaggtacacaagtgctagtaatttattcaaagcatcccacagaattgaacgtggtacctgaagaatgtgcttacccttccctaactctctgtgaagattagattccctagaatgagacaatgagtgagctagttatgagaaacgaagttagcagtttctattttcttgaacagcgcaatggtggttagtggaccctggttgtaggaaccgtggtctccacctgtacccaactgactgaaaggagggggtggaggaaggaggctccctagttggagaattatcactgtttgatacggtgtagtcagagtgtgtcacagtagcatttgctcacttccttcctgaatgctctatataaatagtttggtattggcatagcaacctgggaacaaactaattggcatttgattcagcttgggagttttgcagtgcttatggcccatgtggaggaaagttcaacatttccccaacctcttccaaaatacattagaaaaccccacatttctggttcagtgtaaacattaatcaggaggagacagcttgagaacacaccgtgggcagcagtggcatctttatggctataagctagagaatgagatgctgaggcatgttcagaaccacctggctgcaggtgcattgtgaccttgctttgaaatactgcaccaaagggagaatgctcctcatagggtgatgctacattgtcaggccaaccaactttatgcataggataaaaacagtgggaatcgtagaccccagattcagggttagtggtcatcacgggagaagatggggatggagaggcagtgtgagcatgtgggcagcgtcacctgtgtctgctattttacgttaaaaggtgaagcagatgtgattttttttttttttaagggggaaaaatactcatttgctcttactgggtggtagatatgctccatagattatccaacttttctatttgacttatttcctcataaaatttgtatcaacacctccaccgactccccagttcaacaaataaaggagcttcctctctgtaggcttccttccatcagctctgtgcttggggtgagggtgcgggagaaggcagcaccttgttctgactgccaccatttctctgtgcagatgtctccacactccttgacctgtgtcacatcctcccgctgggatagaccatattctagagaggtagcagcatttccactggtaagttctctcaactgaactcttcaaccagggtgttactatagctcccttgcccctgagtgtttccctcctacagtctcatcaggaaaagcctatctgggatggctggtgaaatgtggactgtgatgaggaacagagggcaagacttggccttcgagggtcctctgagctccttccgggcatcagtcacagacttgggaacccacggaagcagggaattagcactgagcatcagtcctgatgagtggatcagtgtgctgtccactgcatccagcagggaggtggtggaccccagtgtgatcgtgtgtgtgtgtgtgtgtgtgtgtgtgtgtgtgtgtgtgtgtgtgtgtgtgtgtgtgtgtgtgtgtgtgtgtatgtatgtagaagctggtagagggaagaagaggatatcaaattcactggaatttgaatttcatgtggttgttagctaccaggtaggtacagggaatcaaacccaggtcctcttcaagagccctaagtgctcttagccatctctccaggccccttcctctcctcttttggttatgtagaaaaggcatcttgtagtcccagaggtgttgagataagactccaaagttgaaattgtgaaaaatgtggattttagcatctgttgggccagcaatgccctagactgtgggaacatgaattgctacatcctcctccccccaaaggaaagctcagaacatcccccatcttccgtcttttccttttcagccctttgtgaagccagagaacaaattctggccaaccattgctcggatcgatgacatctatggagatcagcacctggtttgcacctgcccacccatgggggcctacgagtctccattttcggaacagaaaagggcctcctcttagtccttcctctctaagttcaaaggactagtttgatgcttctttctgaagcatttgacaaacaaggatatttcttctcttgcgcttggctcaagcaggaggtttatatgttgtatatttccataatctttcaaggtaatgtaaacacaattagcatggtgagtggtgacagctgctattcatgttgccttgattgggagccatttagttttatgaatacaaaatctggggtgcgctagcaattttaactttttaattcaagaaatttgcagaggacagagcctatgctgggaattcaatagacattctttttgttccaaataagtccttgaggactgtgccctctgggaactcccggggcaaatgtttacattttgtatacactgaagaattcctcctcactaatgtgcctgatctgtcacagcatttctgttttcctttcactatgtggaacttttttattatctgcttcattagtgttctaataaaaactgaatttgaataatgccttcccattctatttttatacccatgatgccccagactcagagggaactgactgcagggcagtgacagcacccaggccaacagctacatttacccctggctgaagacggtttgcactgcccgtttgccagagaaggccacgctggccctcttcattatgggcttttgcaacttcacttcagtagcagtttgactcacttagcagttaagtccagagacagtaagccaagggctggtggtcctttatggagaggggaggaagcctcgagtgaacggagagggggtggagagccagaatttgaacctagctccagtgcagcggtcgaataggagtccatgctgccatggcaacagcaaacctgaagactgccttttccaagcaggaaaccattttctgagcgtaggcgggcaccggcgcacagcggtcctttctctgcaagtaccggcatgtgaaaatggatggagccaacagcagtgctccactttgctacagtgcttgcagttggttgctaaggctgcttccccagctagccatctattattcatcttcagagtgtaacaccggtaaccacttgtcctgcattatcatacctcttgtgtttacctcacgctttgccagtcctctcccacctctgggtcctggcctgaaggggatttttctacttaaaacactgtcccctcaagccccaccccggcacttggtttggcacctgttcccttcatctcagtactttgtaaaggttttccttgaattctggggaaatgggccacttctcttatctccacagtttgttttctccttaattttttttttttttttttttttattttctgcctcatagactaagtgccctgagaacaggaccacatctgtcatcactggactcttagcagtgagggcttcctgtgctgtgttcaattagaactagttagtatcttgtgactagaggcatgatcctgagtcatattgcatggaagtcagtacttgcagtgtcatttgtgaacagatccttttaagagtgtaaaaacaccaagtcttgaagacagcctctggcttcttgtagaatgtgcccctaattaaaaaagtttttgtttattcctcaagatcagccctccagctattcttagctatacaacagagttgcatttaatacaaagctgtgtggctgtgcctatgagtagcttagactaggagtctgtgaaaggtctgtgcctgcgtcctatcaactgggcatccctctgtctcacggtcctcatcttacaggacacaaggggccagggggccctggctcataatgaaacaatggactccatatgcttggaaacatccctgactcagtaattggggcccagtactctgcagaccacccaaagagctgacatttcagtttccaaaccacttgtctcgggtggcttgtgcacccagaaagggacacttgaatcctgtatctggtcaagaaactatcttttgtcactgaatataccacacccctgttctggataaaagactgtgtttcatctatctttgcttatggagatctttctagaatgcaggtcaacagatgggtcttcagaggctgggtttttgtcagtcttgtgctaatttgtgaggtggggtgagatggaccaggagagtcctggggatctagctgaaggtgtcccttgcctgttttaggcaagcattctacttgagctccagccccggccctttaaggtgaatcttactactttaagaagagatccttttgacttggctgagactttcatagctgttcccaaatgaggtactgatactcactgtgcactctgatctatgtcctcggctcagtcctgtctgaaccaagccaagaaaacgccaccaccgccaggttccctatctcccaagcaagtaattgcaattggaagggtaccatgcaggagcccaaacctaaggccactgataggaatgttggaggcaggggaatgaatgccccaaggccttgaatttgaaaattaaatttggagagcagtgctgataacagtagcctcaggattgtcatagaaaccctgagtggtaggtggaggggctagaggaccaattgttcaatactagttaagggtgtaggatgctctaaagattgataatcatgtgatacttcctccctggtgcctttcttgttcataatgtgatttctatctgacttcattgactgctttgtcttgtccttactcctgtggttaattttgattggatctggacatttccaggaaggggtaagggcaccatcttccatcagcagcccagatatgaggcagtcctactctgcctgcccatctttgctccttgcacctgagcccatctactctggctgtggctgctggggccgtccagcacttctttcagcctcccacaaagtggactaaggccagtggttctccaggaatcccccagccttcagcagttgctgggttctcagcctctccagtgtgcagtcattgttgagactacccagcccctgtgtacactggtgtaataaatcccttcataattgtctgtcctattccccctgagactccctattcatcttcagaagcatgttccctgaagcctctcctgcttctcagggtgggcaagaaatctggaattttaaaattagatttctcttctctaatgacccaaaacataagtatgatcagaaaacgtggcaggaggcaggatctggtgctgaccaaggactggtgaaggttttccataaaagcagtgctttttaaatgagagtgtggtggctctgacaggcaacccagtaacctaaccttttcctctacattacggttgctaaggggaatgttcacacaaatccattaaacattattttaatttactccctgtcaaagaagatgccttgtttttctgttaaaaattagcttctgaaatgagagatgttgggctgggcttgcagttcagtgccagagcctttaccctgaatgtatgagggcctgggtccaatctccagcatcacaaagcgaaacatgccaacataagtaagcaaactgaaatgaacattggagcgagcttataattctttaacagaatctaaagtagatgagccatattgttatggatttcaggaataatgaaccaatatttgttcatccgttgaaatcaacacacagctaattaagtattaaaagcagagggcaaggcaaggtgccagctgcagggagctcagggtactttctgctcagttctgcaaacctaaaactgccctgaaaactgaagtctatttaaaaagcaatctgtgcactgatctcatttccttattttctaaagacatgtaccttctttctgaggtacaccacagacacaacatagacattgcacaagcaggcaggcaggcaggcaggcagacagcagacacacacacacacacagttgtgacactgactattgcttgcctggctccccacatcattcatggttcctgtggtgagttgaatccatataaactacacaggttaatttgatatgcacaagtctgggtagcaaaggatccagatgaaattggtaacaaacgacattaactaaaaatatctcacatcttgcgccaccctatatgccctttggtgtacactcagcctgtcacataacttaaagatgttttcatagcttcttgcatcagttttactgtttgtccttgttggtacgggtgtggggtattatgaatgtgtggagggcaaaggcagatgttatggatatttccgttatggttttccatctttattttttgagatggtctgtcacagcacttggttaggtcagcaattcagttagtctaggcagccagtaacccatgtttctgctgccatgcccagccttttacattggttctagaggactcagggctacatgcctgcctgtcatgaactttaccatttgagccatcacccccagccccacagatccccattcaacagacagcagtgttatcacaggcaccttagtctgtatttgacccatctggtctcttgccctttgtgggaaatctagagctttattctagtaaacaaaataaatataactcaatggcatgagaacactgatggacactcccactctatcaaacaggctgggcttggaagtactcgagtgttaatccagggccatttttaagagtagggcagctatgctgtgggtcgatgtaggaataaaggttggaccaagtacacaggaaacagcaggggcaggagagaattctaggcagcatactctgggggagcaagagggaagtgaggagaggaaaagggattcagcaaaacccctgtggtgtggagatgtctttccatggaagcaaactctcttcaaactgcatgaaaggagtcaactctgtgccattaacaggactcatgctttttttttttctgcaaacagggtttctctgtagctttgaaggctgtcctggaactggctctgtagaccaggttggcttcaactcacaagagattcgcctgcctctgtctcccaagtgctgggattaaaggcatgcaccaccaacgcccggcccaggcctcatgctttcacagcagatgcagagaaacttcagtgtggctttagtcttgtccactggactttcatcgcactagtaaaagcatttgggtacatctgagtatgacggtttgaattttcttcagaagatgttttggaagattattgagaaaaaccaaaacaattggtgagaccaaagtggttttatgtaacagatgaagtcatgaactcctagagaacagggtggaatgcagagtgctcagtcgtccttgggaaagcgcagacttccccagcagtgctgccactgagggtttacccacactgactgctgagcggccacagggtcaggcacaggcattctttaaagtatggtataagggacaggctaacagtataatcaacatgcttcaacacagaaaactatgaggaatagtaaaactcacagacagaaaaatctaggtgttttaattgattaaaagaggctatttcaaaagataatgaggaatatactttccataaaagaccgatggacaggctattcaatttgccaatagaaaggaggacaagctagtttcatcttggaagaaggatcctcacttgagaaaatgctcccttcccattggcctgaaggcaagcaagtggggcatcttcttgattgataccgatgtgaacgggtatacaataatcactccattctattggaaaatttaatagccaatcatgacactttcccagaaccttactttaaactggatgtagtaaagcaaaaaccaaatattagttttccattatcttgaggtgagagcctacacaggatgaaagtacaggttatagatttggactctagttatcccagtctaccacacaggtaagggtgggcttcataatacctgcctcttaatggctggaaagactatgttaacacacataaaatacatctgtctgtctgagcatacaggaggcagagggaagcagacctctgagttccaggttagcctgatctacttagttccaggctggcaagggatgcatagtgacaccctgtctcagaaaaaaacaaaacaaaacaaaacaaaacaaaacagtgtataacaaactttcaatattcatgctgaatattaaataccaatattcaatagcaaataataaattgttgacaatagatgtttataaatctgtgtgtttgatccagtttttgaaatattctcatttcagaaatatagaagtagcactcgaaatactatgaaaaaaataagataaaccctgcatatagcaaagaatggagatggctcagcaggtcagagcacatgctgttcagatcccagcacccacattgggtggctcacaaccacctgttactccagttccaggggatttgaaacttttttcaggtccctgcaggcacctgcatgcatgtacagagtatacatacagacatgcaagaagacatacatacccataaataaaaattaatgaaaaatttcaaaaagtagttgcatatcatagaatagtcagcctgttcttttgaaaaatatccccatttaccattaagccacaggtgaaatgtgtccttactgtgtcagacttcattctagctttcataccaaaatcagagtgaaaatgtttcagcaagacaaaatgaaaaccaaaactgatttacaaaactccacagaactagccagaagaatataaacaagtaaagttaaatgtgccattgtctgatcataaaatatttattaaggaatactcttaaggaatatagtgaatataaaatttagggtcacaatgtgaagcaatttcaatcttctcaaaagtcagcacagccctcataatctgcagatggaaaacaactagtaagaactactaaaagcagccagactttgacagaagtggcttttcgtgaacatttacaactagagcttcagacacctctgtcattgcaaaatcacaccacattacactaatgtagcaacaatgcattcatattgttctcattagtcattagtagtcaatttgcataaaacaccagaaaaaaaccacaatggagatcacaaatgagttaaaaagtgaacctgttcttgtaaaacacacaatgtgatggaaatagacacatttaaaaagtattatgcatataacagaagctgtgttcattctgataatctcatctgtcttctttactgggaaagcaaattacaagaaacaggcacaactaatatttgggaggcagtgtgtagctaaaatctcatttaactaattagtcaatttttaaaatccccataaatcttttctgtcctgaggtagttgcaaaataaatcataaattgggtatcaactacagtggaggctttgacgcttcattcattaaaatgagttgttacgagaagaactaccttttcatatctaaaagacagttgagaatgggcctcttactacacacaaaggaggatggctgtgggaaagaggagcagctgcttccggatgagagacatggtccagcattgctttaaccctccccactcatttgagacttgatactgtccaagaagccaccaggaacaacacaaacacagatcaccgccctttgctgtagccagggaagaaaaggtcaagtagagcctgcagagtctcatttggaatcatgacataatcctggccgagatcatgccggcaagcagggcaggagaaaacctgggccttaaaggagcgctgtaagcaatcctatgacagaaacaaaagaaaaggggaggggaggaggtggcgggaggcagacggggtaagcaaggaaagagggagaaaacaactatgattatatggagagatcattcaatagttatattcttaataaaaactagataccccctgctcattacaagagaaaggtctaggaggaacagttctgaaggcccaaatctgcaccatactgtctacagtcacagctttactaacacatgctgtgagacttcaggtaagctaaagtagcttgtggtttgatttcctcacctagtgaagtgattgttagagactatgcatgcttcccacaaccttaactttcatggctggatttaatcaggttctgctgctgagagttaaaatatattatgaaatcatgaaacatgataggttctctcaggtatatctagttatactcaatctagagcttagtgacatatggttatgggtgaatatgtatgtccatttcacaaaggaaactaaagtcctggagtcagatcagtgcacaaaatcacacttggtacagcaagcttctaatcctgccttgtctaaagcttgattttcttcttcaagtgcattggcagcacaatcctcaattcacctgagcagcctgccagaaaggacttcttattaaatacatgtactctctcagcttgcagtatagtgtgtaagacacacaatcactattaaagagaaaagaatagggtactgtggtgtctcattctccactttaacccttcctcagtcccaagcacagtaaaatacctctaactgtatggatgaaaattactgctactatgaaattttaaattgcatttaccatcaagatgtaaataaaaagttttctaactttatagtaaaggggccataactatccttcatggaaaaatggttgttcacatgctaaaacaggtggcacccactgtgctgtcagactagaacataaagggaaagtggcactggactcaccttgcagacattgtgaaagcactctgttgtgacaggctgatacaccagctcctggcagcacacacacataaaagactgttccagttttttcagaaaattctacaatggtacccaacaggagaaaaagaaggaacagattaacaggtcaaatatactcatgaaaatctttgtcacaattaacatgctttccactaagaaaaaaatcaagtagtgacttcctaagataacctaaatgaaggaaactaaggaaacttcctcaagtccctcagaaattgcagtctagtggtaataactattagattttgtttgttcctttttttttgggggggggatgctgtgcttaacagagagaggtctttcctagaacagagcaggccataaactattcttcgtttctgcatatttgcagcttctgcctcttgagtaacaggaaagtgcttccatgagcagctatttttgacttaaggggtagggatgtggggaattaggagcagccagatggctcagcagaaaagcagcttgatgtcaagcctaacaacttgagactcaccactgagaaccaaatgacatgaagtgagaatcaactcccatgagttatcctgacttccagaggtacaccaagaaccacacacacccacacacatgccccacacccaaaaaagtggtataccacttgcccagcactgtaaatacaacaaaaaacaggcagctcatcacacggccaatcagtattgtgttctttttgttctgtaagctccactgcacagattccagcaaagaaatacattggctggtcagtctttccctgtaacaagctacaatagtttttctggaactaaaacagcattaggcaaaaactcttaagagttcagtgttgcaagaaacctatttatcatcctaagattctgtgtactattttgcctctatttccaaatcttgtattttctagggggcaatatttatttaaaatgaagtacaagtgcaaacataatcaaatgatgccctgcatcttcaaaagctatcattagttccaatttaccctggctctctctctctctctctctctctctctctctctctctctctctctctctgtgtgtgtgtgtgtgtgtctgtgtgtctgtgtgtctgtgtgtgtgtgtgttcttccttcctttctttttaaaaaaggtctcacactatgtagcccaggctggcctgagactcagagattgaccttcctcagcttcctgtgtgctgggattaaacacatgtaccacaatgcttggcttgtttgtgtcttaacctataaaaaggaggttttcaaacagtcataaaggtgatcatccatttggtttttatagtaacaaaaagatattctttagattctttttactaatagaaggtagaatttataagctcttcaaattaaaacatcaacatacatgacattttaaaagatgtattgacgctaagtggtattttaacatagactataaaagtcaagtgaattacaaaccattaatgtgatacattaaaagaatatacactacatgttcacagtaaccaccagctgtcaagtcatagcagttggatgcaggcatgtcaggtcttgttaagagcaggacattgatgcccacacattcatgttccctcaggtggcttttcccacagcaatatctgctactttgtcccatgctcatccctatctggagttcactgaagttatctaccactaaccagtcatatccttcccaacaaatctaactgttcacctaagtaacggttaacaactattgtggcccaagggaaatgagtctgacctcacactctttatatctgggtcccttccctaaaaatcaggtaataactttcacagaacaaaatctctatactcaaggctaacccaagagataaatcacatttacaggcaaaggaaatgggagacttctgacataaagccaaatagtatttgataacctttcctaacaaacttaatgcaataatgttaattatctctcaacccaaaaaggtaaaacaatcacaggagaccctccaggctagatggggagcaggtacctcttactttactccctcgagacacatgagacgttttagttgttgcaaaaaaggaaataaaggcaacagtcagtataggaagaattacaaagagatgggaaaatataatttacctagagctctgtcacagttaccatcatatcacttcagaagaaaagatataaagctactttacacagagagatcaaattaacaaacaaaacaggagatacaataaatcaaatgtgcaaatagctcccatttgaagatttagcatttggtgagctcagtttaacttgaaacccccacatcaaccttattagctctccctcaccccttctgaaacagggtctacgtagtcctggatgtcctggaactcgatatgttgtaacccaggctggcctcaaactcacaggcctctgcctccagagtgttgggattaaaggtatgtaccatgaggcccagctgcactttaattattgcaaagtcaagaagaagaaaaaaaccctagataaaaagtctttaaaattacatgtccatttgtatgtgtatgtaaggtggagtatctgtgcatgtgtgagggcaggtgtccataggggtccagaagagagcaatggtcccagagacagaattacaggtggctgtgagctgctcaacctgggtgctaagaactgaacttgggtgttctgcaagagtactacaggcttaaccacacagtcacctttccaatcaagaccggtttactttacttcaaagctgaacacacaaattttgaaaatcatacaaactacttaagatacactattagatatctttaaattataacaaatctttctgagttttagattcagttgtctgagttttacaactgaaaattcttccccaaaagagcatcccaatgtcagttaatcagttcatgattaaaaactaacattttagaagttcaaaataagtctacaggtgcttaaatttaatgactcctgttagttctaaaaggtggtgaaaatggattagaaaactacctaagatatagtctgaactgacttgagaaaatcactgtttgcatttttaatatcagagcatcaatattgaagaaaaacgttataccggtccttctacaagagacgcaagcacttcatcccatagcttccggttctgagagtcttctcttactaggcgctgctgctgagggctgagttggaaagcctctactgcctctggtgactccgatgtcttcaacactttggaggcacttggacactcatctaggattatttataaactatgtcagcagactttcatagttctgcttagaaactgtaacaaaggttcactggtaccagcaatgtttagaaagaagatgagcacatggtgcagtgtcctcgagtctagaatactttcttgacttgttgctgatatggttgtaactctattaaagagactcatcctctcagaaaataaacaaagaacccccccaaaaaaatccctttattataattatttatgaacccctcaatttagccactctatatatctctctttatgaaaatgtgttattaatatgtaccctctacactgcttaccatctgaagctggcctcttggtggcttcattggtctgcttctttgactgtccctttgtcttcttcccttccttatctgatgggtaacctgctggatactgatgaggggagtaaaaagacaacgctgagttaaatcctgatggaaaactttatagagggaaggggcagttgtctatacattctccatatttgatttacataaagcaaatatacacttaaagaattcaaagagcaaaagacaattaaaatctcaaattctgcctaaagccttgcagcttggactgttacaaggttttatattgcaatgaccttagttgcagatcgaagagaaaaatcttcacatgctttgtttgtgatgaaaaatttaagaaggctagaagtggggatcaaacatggggcacaggaaaggatattcaaatagacaagatgaaaattgtgggttcaatctcaaacaaaaaactgagtgccaaatttctcatctcccaaaagtatgggctggaaggagattttagaaactcaaatggaactaaattaatgttgtatgacaatcagggagcctgttgtgtctgagctaggtcctctgcatgtaagttatgactgtgtgcttggtgtccttttgggactctttacagtgggagtgtgtgggggggtgaatctgacttttgcctgttcttaggaccctttccccctttcctcctactgagttgtcccacccggtcctgatgtgagggttttgtgtctagccttactgtaatttgctatgacatgtttggatgatattcctgagaggctccccccccatcccccacccccatttgttttgttttgttttgtttttttggaaaatggaggagtgatctggggaagagaagagggcatatgcgtgtgttaggggactgggagggatggagggaggggaaactgtggtggagatgtaatgtatgagaataattaaaagagaaaataatttaaaaaaccttaaaaagcagtgtgtgtgtgtgtgtgtgtgtgtgtgtgtgtgtgtgtgtgtgtgtgtgtggtgtgtgtgtgtgtgtgtgtgtgttgtgtatgttctacttttccccagcatggtcacaagataaccaggaagccaccttttgtgtggtttccttctgcatcctttacatctcagtctactgacccattgatacacgtacaatgttaaaggagcagagatggctgtacattttttgtaacacacgaacagtgcagaccgagaggctctaacctgcaatcgcagacacagtctccttgatcgttctattccttctgaggtccaaggagcaggttcaacatcatctcttcttaaaagataacgccaaaccaagaagccatggctggatgaaatctctggccagtatttcactacctatatcatgacatttcaggatgacattgaaatctaaagtttagactaatcatgacaccatcacattagtagtttaaataaatctgctataattaaatgcaacttcagaaaagttgctttgctataagaaccgtaaattagtcaagaatattatgaacacattgttatgagcttatttcctattaagatagttcccacttagggttataatataaatttaacagagtaacaagttaacagaattttgcaaactaagcagagacaaatggtggtagctgatttgtttattctgtatccaaggacatgaacacagttttaatgctataatgtatacagtctgccttggaaactctattgtcattattaaaagtattttaaagatacatagtagttaagatatatagtggtcaaattacatacatgattttattatatatactatatactaaatatagaaatttttatatatttctagagtggagtgctggcccaaacaagtcgtggagttgagaccctcagtgccaaacaagaaacagacaaaagaaaaccaactgggcgcaaactatagttctgccttaggaatttcaaagccctttttccaaatcttgaaattaagagttcattcacttcacgtatcttttacatttcgaagtagaaatgccaactgaagtagcctatcctttctctagcccacccagagtagttccctttggtaaccatgtcttaaaagccccagaatgaccaaggagatatcatgccagatagagcaccttataaatgccatcatatctgttgccttcttctggagcatatttgctgatcttcctccctttaaaactgcgtatcactctgactggcttaccagctctccaattccgagattctgctccaattttatcatccaatggagcatcacagtttagggccaatgccctaaaagaagataaaacaaagtctttataccaagcaatctttcttcaagtatataactgagtcattaactcaattaaaaggtaaattatgccttacctgatgactaaaattctatgattctttccatattattccagacaataggattatgctttcccccaccagcagagaagacaaatcagttttctgatgtcaaccccaagcgaggggattggaccgtagggttcttctgaaagtagtaacatctgtgccacgtataatagaaaacaactagaaatacatggaatttgcttaaaataatgtttgttgagaaaagggagaatggtgggaaactaaagcaagtaattgctttaacagttaatttttgatgaaatgagataaatttctggaataatgtagaaagaatccagaaaaataaatttttcagcaaggtacaaatggcttttctagatttttccacattccagacagtagaaattctgaaaagtctaaaggatattgagaacaagtgtgacatgagcatattctctgaagacctccacagaaggataaatttaagtgcatcaaagtggtggggaagtcacgacagtgaagaaattaggttccttgagattactatggtttactgatgacacacagccacagaggaccactgtgtgggaaggagcatgtcttggttaaggctcccccttagcatgcagtggtaaatcagtgactggattggatgttgtaagaacttttgaggaatatatagttctaaaactagcagtctacttggtggggatattcctttatgataccctacttcctaagcttggtgaaagaaaaccatggctaacacacaaaggttaaattgagttggctcactaggtaaactgccacattgtaagtagaaggacctacgtttggattcctagatcctccataagaaacttcaggtcataaccatgagtatgtgggcagcacacacgggagtcaacaggcagtgggaagatatgggaaacttggaatggacccaagaggggttgatggggagagtagggagcgaatatgatcaaaaaaccattgtgtatatgtatgcaaatctgaaactgatgaaaaatgttatttttaaaacaatgactggtgtagtaatgggcttataatgtggctataatcacaatgctgttaagtggaaacgtggatctctggggcttattgatcagccagcatagcctacttggtgaattccaggccagtaagataccctgtctcaaaaaaacaaaacaaaacaaaaaaatagggacaacacctgaggttgtcctctggctatgcatgtgcctcttcatacacacatacaaatatacatatatacatgcacaaacttagcaaacttgataaaatcaaatataatacaaaatattttggggtattttctttgttgtgggctcaaactaaaaaaaaaacaataaacaaaaaaaaaacaatcttaagactgtgactgacctattgataatgaatctcttaaatacagtcatcttaaggcaaatggagtgtaacttttccagatgtgctgaaaattcagcttgctaaagttatgtcttttatctaaaggggaatcattttaaaacaccaggaagtaggataaaatatagccattatggctcacaacacccagtgaatatcctcatctagccgcctcaggcacaaggcacacatatggttggtacacagacaaacatgcaggaaaaatatccatacatataatataaaaattttaaatattaaaatatagccatctaactatagagttattgttttttttctgttttgctttgctttgttttgttttttgttttttcgagacatggtttctctgtgtagctttagagcctatcctggcacttgctctggagaccaggctggcctcgaactcacagcgatccacctgcctctacctcctaaatgctgggattaaaggcgtgcgccaccaacgcccggcttagagttattgttgtatcttacatggaacacctctcaaatcatcactcatctttttaaagagagaataaatactaccttctcatcactgagtggcatactttaatgttcacaggtaccattaatcataactattgctgtcactacatacgactacatccatcattttttacttcatataagtatacagactcttgaaaatgtgaaaggagtctgatgtataaaacaagacaaaagaaaagcaatgaagttcttttattattgtatatatataactccagcaatcagtggccttgaatggccctggcataaagaacagctgtatagcttgatgtcctcttcactttctgaagcagcagagttgggaagaaatgggtatggttcagaagcaacaaagtgtcaaacttcctcttagtagagaagcaagagtgaattgtaccatatactgcttggtaaagagtacatgtttgtggactaagctagagacctttcatttctgttttcatgttcataaggcaaaataattctttagaagatttataatcaatcacaaggcacacacagctcagttgtctaaagtttaaccaacatctagttggttaactatatgttaaggactataagacaagtcaatcccaaattgttttcagtctactgcatttttacaaccctctttttaacagcaaacatttttattgttgccaatcattttctaaagaggttgtaacattacttatgggattatccaaaaatctaaaaggaatgtactatgtatattccaagtgttggtaattatgaaccaaagttcactcaagcaaaagtgttatagaacagaaaaataaaattcttatacttaacaacccaagccattgttaatttaagatgcatggtcactgacaaaaatgtgccatgctgggttctttctgatttccaaggttatatctcttaaagagctgttctttttgtagtaaaaggaaagcaagggattatattcctgtctcaggaatgagatttcaccagcaaatctgacatgtctcctctactagttcagtaaaataaacctactgtcagaaataatacagaagatatgaaaacaagagtctatgcaacctggtatgcatactcttgaaataatacttgtatattctttatttgacatgataaaaacaaattaaaagtacactatttaaaacttagtgctttatattcaaagtgcaaaaataatgatttttactcaatgccaaaatactctttataggacataaaaccttgtaacttttatatagtccatgaaacttttactatgacaagtgataaagccatctttgctatctagggttttagttattttgttaacgccagcatggatttacagaataaaatatttggaaattaaaatttgtatcctagtaagggtaacactaatattaaatgtcaacgcaattggaccttttagataaagggaatttaattcaaaaagatgactttagggggctgcagagatggctcagaggttaagagcactgattgctcttcctgaggtcctgagttcaattcccagcaatcacatgatggctcacaaccatctgttatgagatctggtgccctcttctggtgtgcagatatacatggaagcagaatgttgtatacataataaataaataaataaataaataaataaataaataaataaataaataaataaaatcttaaaaaaaaatctgactttataaattgaagtcactttactaatacaaattctaactgcttggagtgcagagtgattaagttacctgatattttacttaactattttcataagcctatttcacattagtgagtcactctaaaacaagcttgcacagaaaagatatatgtgttgaggagagcatcactttagtttgtcacttacagcatactaaacatgccaccttatcttcaatttcatgtaaatcatatatgttcctttctttcacaggttatcaatatgtttcaacatgtatagcacatgtatcaagtaatggaagaataatgtcacttaaaaattaacagtataaaaaacagtggaattttaatttcatgtaattcctacagcttaaataacaacttatactgataggatctaagtttcaagtaaccctagattgtacagcctttagaacagcacctgttcatgtttgtcagtgtctgatcagccgatggtgcaccgattcttttattaccagcaagatttttaccaccacttccagtgtacgtgaactcatcacctcggtcctacaggggaagacatttttatagtgagatatttaaaactgggtataatttcaccaattctcaatatagaatcagaacattaagttaagatgctattgacatctttctcagagaacttaccaaaatacagcaaaatacaatcatgcttgtagtgtactttcaagctgattttgcttcaaagttctagtttccaacatcatcaaacagctattctcttgtgtgtatgtatctaagtaatccacaccattttacaaaataagggcttatgagttagaaacattttatttaattcaatagaaactgaaatatcaacagcagcttgcaggttctttatgaagagtgtcacgttcagaaacattccatgatggaattcttggctgtcaactacaccatatagaattttttgatgaatattcaaaatttgacacggacattaaattttataaactaagtttacacaaacgcttctccttatagttctaaaagcatagcagtttttccatatttcatattatgaattcatccatggtacactcaaggtttaaaaaaataagaactactactaagaagaaacctggaaaataatttgaaaattaaatgcagtacttatcacctattaaattttgataaatatgcccaaaggtgatgttagaagaaccaacaacccaatcatttctatggtaactacaaatttatataggtgataaatttagctgattcaaaactcaaaataactcaagtatcagttataatttactctaacaatactagctgggtagttgttttatatagctttttctatttccagcattccctcagtttgtgttttctttattgtctctatttcagtttttaggtcctgaactgtttccttgagttgtttaattgtattttcttggcttggcttgctttcttgccaaggttttggtttgtcttttccatttctctgaaggattttctgatttcctctcttagggtctctatcatctgcatgacgttgtttttaaggttgctctcttctgcttcatctgtgttggaatgttcaggtcttgctggtgtagagtccctagactctggtggtgtcacattgattttcctgttgttggatgtcttcttaaattgtcttcttcccatctcttcttccagtgggtgcaggtggtgtctcttcctttcctggtgtgtaccagtccaaggttctcttccagtgggttcaagagggtctgatactctgatgggtctcaaggtggatgcaggcaggtctgaggcactcgctgtccaggtaggtgggagcaggactagtacagagatgtcagcagactcagggttgtttggtcctcaggggccgagtagacctgcctacagaccccagaatgggagttccagtgggcccaagacagaggctgaagcagctcacttctgccttctgtcctgagagggggcaggagtagcccagcgatctcagcagactcagggttgtctggtcctcaggggccgagtagacctgcctgcagcccccaggatagatgttcccagattaggcagacagaagttgggcccaaggcagggccgaagcagctgacctctgccctgagtgggggcgggagtggcccagcgatctcagcagactcagggctgcctggtcttcagggacagagtcgtcctgcctgcagaccccagggcaggagttccagagtgggcaggcagaagtaaggcccaaggcaggggcggaaacagctcacctttgggaggtggggcatgtacataccacagcccatgtgtagaggtcagagtcatttctctccctctaccatgtgagtcctggaaatcaaattcaggatgccaggtctggtggggtaagtgcctctacctacaagcccagatttgttctcttttttcttttttctactgttaaaaaagagagtgggtttttctactaaattaatacttttttgaaggtttatttccatactgttttttcccttgggttaaagcctatgtaaaaccatgtgctttttaagtgtttttatgaggcaggcatggtggtgcatgctgtaaccccagcactgtgaagtatgaagaaagaagattagagttcaaataggggggcaacttgggctacacagtgaacaaatgaatgaacgaatgcttctactggctcccaagccttcaatttgcaattgataatgaaatgtttaagttctccattttttaaaataaggagttaagtttaatctataatgtgtattttatttgaagaactctaattaacaaaatcatctgtgatggctcagagcccttttcttcctttttctccctttctttctttttcttccttccgttctttcttttcagtttgtctgtcttttgttcgttttttgagaaaaagctcaggctggtatcaatcttactgtgtagctgaggatgactttgaactcctgatccttctaggtatgtgccaccatgccctactaaaatacttcctaaattgatgagaaacaatctttcacactgtatctggattgactccagaacacccacattaataatcaccaatattaagttacaataatgagagtgctataatgaaaaagtagtgagcacattaacagaataggcacaaccagctaaacagtgatggaaacagaagaagaaaaatattctgaacattcttcaagtagcgaacaagcaaaccacgttaaaagtctacactataccactaatacatatacacttcaatcattatgccaacaaaagctttctattatggtggacagaaaaaaaaattgttgtgttttgtgggccatcaagtagcttgtgcatgactgctgcctaggaagagtacacacaaagctatacctgctcaaggatatgatgctgccaccatcaattaacagaatttcccatactcccatcctggtaccaaatccatggccttgtgtgttttaggctagtactctatctatcaaggagctacatttccatttccacaattttccaatttctattctacctcacaatctgctaaaggatctatctaaaaatagactgttgtacctaccatcagtctgatggcagggaatctgatactttcacaccaatgcacataaaataaagttaaattaaaagaaagttcttgaaatgataagactatacaaatgagaaacagattagtagttatcaggggttagagggcctggggacaatataacaacaggaatggtgagagcagaaacatttggcatcctgactgtcagagtcaagatcttggctatgatagtgtctaataaacaattcagcaaaggactactcttgagaaaaaaaatgcatataatttctaatgctgttaactgtgaaagtataattatttcaaaatagacttaattttttaaaagaaataagttccacagagtatatctttctttatattagttatcaactgtttaggctaagccagcatatgtaaaaaaatagacactgctaatcttataccttatataaggaccaataacttaaacaaaaactatgctaaggaagacagctaatgtatttcagacacaacttttgtactttatgaagtgattaagataggttctaaagatcatatcattacttacaacttcatctgcaaatcctccagccaggacaagagaataagccccatcattgctgcgaccatgaatgccaccaacatgaggcctatgaacacctgcttcgctcacctataaggtaaaagaaaaaatatgatcaaagtatattatatgtgtatgaaattgtgaaaaataaatgagtaacaactaagttagccttataaatgctttaatgtgtattattaaactctaaagctcaatcatgtttcccctagattttgctttctcattttagtttgcctaaattctgaaggtcctgggttttttccaattctagtacctaaccttgctttctacattatcttattttgttcctttcaaattcagtctatcataaacagaatgatccttctataggtttatttctagacacagagtcttacaaagcagccatgattggcatcaaattcactatgtatatcaggctggccttgaacttgcagcattcttctgcctttgccttctaagtgctggcatcaccacaggcatgagccaccatacgtggctcagaatggtctctatatgggtaatttttggttggtctggggacatggcttagtgccacatacgcaagaagacaattgtttgggtaagtatagtggcctgtccggaattcctgcctcagcggcagacagggaatacctggagtaagctggctggcaagaccagcagtacccgcaagctgtgggtttcattagaaaacagtaattcttgacattacaaagctggtcagagctaggcgttggtggcgcaagcctttaatcccagcactcaggaggcagaggcagacggatttctgtgagttcgaggccagcctggtctacagagtgagtgccaggataggctccaaagctacacagagaaaccctgtctcgaaaaacaaaaaacaaaacaaagctggtcagatgcctatggctggggaggttaaagaccatatcagagctgctgctgttttactacatagatatgatgtaccaatcacaatgccttctaaataactgtatttatgcttctaaataactgtatttatgcccaaacattattgctgttgtcagctcttgtcacagaagtttcttttctgcagtggccagtatttgctacagacactcctaatagccaaagtactgagaataaatgaatgttgaatgcccagccataagcaggacatcacattacccactccaatacccagggagcattgtcaaagaatggatggaaggaacataagagaccagggaggtgagggaaggggaagaattttagtgccggattaactggcactaactgcctcaaacagcttagtaatttattcaagaaaagtctcaaactttaaaaggaaacccaaagtttaatgacattaaataagaatttatcacgtaacttaaaattcttttaaatattaatttttctaaaagagaaagcttacctgtaccatgcaaaacagaacaataaagcaaagtggtaacaaaggtaactaccatcttactctagtggttgctgtctgatcatgcctggagaaagacagtcattctaacgaatgatatgtgctacttagttgacacccacttgtaacttaaaacaaatgttaacatcacttcagttttaattatttgaaatttttttaccctatcaattaggccaattaaatgcatacctgaactctgaatctccaagttgatccaacaggaataccagggataggtccataatgatttgaagggacaatagtacattcttttgtgcggccaacacaagccattccctgtaagtcacaaaataagctgttggcgaaatcaattacataaaacttttgaagatttccaattcttataagatgtaaatgaagtaactggatcaatgaaataattatttatccaacttaattatcactgatattaacaattaaattgtttaatctcttatactactactatcaatattgaaacactatttactattaattgttagtaagaaaatgagagggagttttatttttaccctgccccagtctctccggctttctgtactagctgaaggcatctttgctttcttcttactcatcttgagtctttccccagcttttacaacctcactggagtcagttttacaggaaggacaataccttaaaggaataaaaaaagaacagagaatacttggtaacagcacactaaaaccagtaacagaataatggccttcctacattaaggtaattactagaacacactggaatatactacagagcctagaaagactaaagaaaagagatgtgtattctgcacattcatacttgctagccacttggaacatcatttttttaaccattataccacttgcttaaaaaccttccatggtagcagaatgtgggggtgtgggagagaagtactagagaagcacgtaatgctctgacagaagaaccgagtttgattcctagcaccttcaagaggctcacaactgcctctaactccagctccaaggattccaatgccctctactggccactgaggggcactgcacatgcacatgtgtccacacgcacaaaagcatacataattaaaacaaacacatgtaattttaaaaatactttaaaaaaagactccttactgtgatttcttacaggtttattacatcttggcagtggtagtgtacacctttaatcccatcactcaggaggcagaggcaggcagatctctgtgagttcgaggccagcctggtctacagagctaggatccaaagctacaaagaaaccctgtcttgaaccaaaccccctccaaaaagaatcttttaaaaaaagtttattataatttggactaggcaccttttcccttatcttttataagtggtttgtttccaactatcactatacatgtaaatttagattatggcaagtatatttaattatattggagccttgttctatttaagaactcagtaagattggatacaatatccatataaaatatttagtatatattaagcatttaattactaagaacataacaggaaatccaacatacgaggggtagagagccatataaaggatgattagatataagtgaaaaggatgaatattatcttaaagctaagcaaacaagaaaaatgcttccaagaagaaaatgactcaactatgaaaacagaaaaaagattatgacttgaagagttgaaggagagtgaatctggctagaatgtagagtatttagggaaataagggagaaaagtagtatggcatgaagatgaaaacacaactaagcaagcattccaggtcctttagaggcaacttaaggcctttgaaaaacagacgtaacaatcaaatttgcacttctgaatgactccatactacagcatgaccagatagataaaaatcagaatccagctcagagttattacagtaaatgcataaaggtactagtgctaagtgatggctttctgtgactctttaaataatttaatgtactatgcatctttagaaattcatgtttggccaggcatggtggtacagtcctgtaattccaagcacctgggagatatatgtaggcagatttctgtaactttgaggcctgcctggtgcacataacaagttccaaggcagagctacatagtaagaaactatctgaagaaaaattaaaagagagatggagggagggaatccatgcttggaagatccattttatttgtagaaaaacaataattaaaacggaaaagacaaaaccaggtgatagtaccagtactcctcttccgggactttatccaaaggtgggctcaggcagtagatgtggtacgccatattgcactcgtcacacagaagctgcatgttgggatcccgcttctctccacacttatgacaagaacacatgtgacatgtcttatctgggtctccaccacacaggtcacattctgggtcatttttccctataagaacaaaattttggaaattttatctttttatatctattattctcataaagaaaaagaaacactgaaacagcacacagccttttttaaataaataaataaaaaagaatgtactgaaaataacaacccaggataaggtttagtaagtgcctcagactagagagatggttcagtaggtaaaggcacctgctgtcaagctggggggcctaagttcagtccccataacccacatgatgtaaggagagaactaactccaagagtcctctaacctctacactggtactgtggcacgcatgcatgcacacacgcacacaggcgcgcataagcactcttcaaaaaaagaaaaacaggaatgaacaaacaaatgcaaaatgcttcaccccagacttactaactgagaatttcatggcacgggcccattggtatgccagagtgtgcaggatggggtgtaatggcaataaacataggcagtgtatattcttgccatcaattgcagtatatacatattgattcacaggtttccctacctgtgcaccagcattcccacaggaagtacagagaactcactgagtactatatgataccttagagcctgtgggcctctgatgctaaagatggacaaggacacacagaaacagctggtagtaatgcacagaggaccagcaagctggctcagcaggcaaaggcactttgccaccagacctgagttcaaataccagaatccatacattggaagagagatttcctaaagtagttctcttacataaacttgcacacacatataaataattttaaataaaaccaatttttaaaaagaacatacatggtgaggagagggagagggagaagggacttaaatgtgaaacaagcttgttccctaacttgaactaataaaaaaaaaaaaattaaaaacagaacatacatggataagcatctgaaagaccattttacaaacaacaataacttactacaaattattaacttttccttgaaaggaggtaaatttgtatggtctactattttataactcctccaaaagttattcattggtcaataaaacttaatttctatgccacagcacattgagtctaaccctaaaagagaaactcatacttaaaaactttccatcagcaagggaaagaggacgggctccaggcgcctcaatcttgaagatttcatctacaaatatcacccggcaatcatttaatgttccttcagaatccctgtttaaaaagagaaagaaacactaatttctaacagcagaatttaaattatgtgaaaataattttaagtcattgtggaaattcattttttccaacttataacttgagcttatagctctggtcttttgtttttgatagcaattactcatcaaagttagatataataacttcaaagtaatatcaagaaaaaagaaattcagactttgttacttagattatcttgtaagaagtacctgtcttataagcatagcataaacactatataaaatgctttcctgttaattaagattcaaatatacttccaatatttctaggcaaaaataaggcgccctcttattagatcttttcaaacatgaagccagttactttaattatacttatttgcatattctccagtgcttccctactgtgactgtgaacctgcttctctcctttaaaaacattattatgaattatgtgaatatgtgtgggtttgtccaagtaccttcagaagctagatgcactgaatccccttggaactggagtaagctgcctgacaaggattcaaatgggtccactataagaaaaacaagtattcttaacaagagctataattccagttctgtttatccttttaatcatagcttttgctttgtatttggaagacatgttatttggtacacatagatttaagacttttatttatttgattttggctcttatcaattctgtatcatatctacttccttttttaaaaaaagagaaagtaccatccatttaattaagactttctccacctttaccttttcttttgaaaattttacatcaagtgtaatacagaaaactacacaggtaaatggataactcaagcaactgtgaggtacatatcctttgctatcatcagtgacgacagcagacagaactgtcatctcttcacatcttctcaagagttgcatttaccttaattttctgtagacttattgcttgtctaccaacctaagcttctcagtcttggttttgacatttgcattcctagggaagtgatcccttaactaaaattaatattaaagacactctataacctagcattctacatgtgtgcatgagcccggaggccagagagggcactggatttcctcaactagagttacagttacagtgattatgagatgcccatgtgagtgcagagacccaatcccatgtcccctgcaagagcagtaagtactactaagccatctctccagcccttaggaagatttttaactatgaaataaatacctatcttcaaaccaccctttcttttatggctcttatgttgctaacacttctagtaaaaacttagtagtgctttactgttgggctagctataattaactgttataacagttaatatttgcctgtccattgttctactcatccttagtctagtcaccaaagtaattttctacctcaggatcattcagagaaacctttttaaaatagcaaattttttcttttcctttattttgttacagggtctcactatgtattcctggttggctttgaacacagagatctctctgccgatacatctcagtgctccaatttaaaggtgtatgccactataccccaaatcatttcttttttttaaaagctcaatgctatgagttttatctgttgttcacacctttttttatacttcctacaatcaaatacattatacggttccctatatggtcaagttatattggtggcttcttcagatttgtacatatatctgaattttaagctgtttagaaatctgtaattctgttatatccttagttgagtaacaaaatcacacttgtatttctgtaggaaggtttgaaatctgttttctaaaatatgaactttgattctaatacactctaatatgaaaataataaagttaaagctttctttagcatgccctaatagttttatccttatttcagggttagtaactattttcatgaaggttcagacaataaacagtttaagctgtgcagtcagatgatcacagttgcagttcctcaaacaaagctgttggtacaaaaccagtgtagataatagtcaatgggcgatgctgtgttccagtaaaactttatttacaagcacaaggagcagtgggctgtagttcatctagccttgctttctactattcataaagaaatgtctgctgctcccagatttatcaccttctgccattaatctagctaaataaaacatgaaaaatacataaatgtggctctcttaacaagcaaaatctgttaatgccatgctaaattctcactgcttaatatatcaaatctagtatatattcattataaagaaatgaaatgctgataagaacagataccatacttgatcttagccaaaaggccaagaagcaaaaggcctaggccctgctccaaatgatatgacagactttgaagatcccccatggaaagcttcaccctccctgaggagcagaaaggggatgggatgggggttagtaggggtcaggggaggaggggagggagagggaactgggattgacatgtaaaacaaacttgtttctaatttaaataaaaaagaaatgaaatgcacatagaaggaatttatgaggaaaatttacaaactccttactacatattatctttttaaagggcaactcattgattattcagtcaataaaaaaaatgagaagcagctgggcagtggtggtgcatgccttcaatcccagcactcaggaagcaggcaggcagatctctgtgagttcaagacctgcctggtttatacagtgagttccaggacaggctccaaagctacagagaaaccctgtctcaaaaaacaaaaatgagagaggagagggacacacacacacacacacacacacacacacacacacacacacagagagagagaggggggggggcagagagaggtggtattaataatttctcaggtataaaagctctttgtaagacagtacctactaccctatcacttgaaagtcctgcaaaggtacaagctacaaaagaagtgaagcggtcatctacatggtttctaagtgtttctgtatatttttgtttcatctataagaattctaagctgggtggtggtgatgctttaatcccagcacttgggggccagggggagatggatgttttgtgaattcaaggccagcctagtctacaaagcaagttctaggaaagccagagttgttatatagagaaaccttgtctcaataaaacaaaccagcaaaaaagaattttagatgttgggttgctaaaacttgtagcaataatggagagggtgcctgaatgggcctcccctttaatgagatcagtgactactctaattatcatcatagaccctacacccaataactgatggcagcaaatgcagtgactcacagtcaagcactgtgctgagttcctggagttcagctgaagagagagagaagggatcagaagaacaagggggggggggggggtcagaagcatgatggggaaaaccagagacaactgacccaagctagtgggagctcatggactatgaactgacagctggggaaacctgcatgagactgaacaaggccctctgaatgtgggtgacagttatgtggcttgttggggggaggctggcagtgggaccaagacctatcacaggggctgaactggctttttggagcccattccctatggtgggataccttgctcagccttgatatagcggggaagggcttggtcctgcctcaacttggtatgccagactttgttgactccccaaggaaggccttactccctctgaggagtgcatgggggtgggtttggaagggaggaggtgggggggcaggagaatgggagggagggaaattggggttgctatgtaaaatgaaaaaaaaaatttaaagaaaaaaaaaaagaatcataggaagcacaggcttgtctagtaagatgctttcatagccaaggttctctaacgtcatctttaaccttagagatgaagatgtatttggtctcaataaaaatcctcaagaatttatgaaaatattctcctataaaatggaaatttctctttaaccccactttctttaatatgaatgtgcgtttcacatctgagaactacatttctaattgaatagttaaatagcattaatgacaaggaccttaccccaggaaaactttcactcgaacttcctttttggtccttgagattgtcttcagtgtggtaatttcagcatcataccaaaatcctcttttgcttggattttctacattgtaattcaccattaccacatcaccaacattcagttcattccattttaaagtggtccttgctcgtggccgtagatccttaccattcatttctagtataccactttctggatatctaagggaacaggaaaagacagagctcagaattattttcacaagaggctaaaaatgtatgcaatacatagaaagacctaatttgcagagttgagagaaaaagtaaaatttccagtgtgggtggtggcacatcctgggagcatatgctaaggacacaaaagcagtagaatgaatttgagatcagcctggactataccttaaaatatatgcacatctataaagtaaacaggtagcaacatcccttcttactgggtacatttcttacctgtattgtgacactgacaggctggtatctataaatgtgaaaataaatgaactcttccctactaagccttggacaggtgcctaggtgccttttcttcatggctttcagtgttaggcaactacaatcccatgttctgtatccatcatcatactaagttggggtttctccccagactcctttttctttttgtgtacatgcatcatatctcatggagctggagtcacgggcagttttgacaactcagactgttcatgctggaagccaaactcagcttctttgggaaagctgaaagcactcaactgctgccatatctccaaaccctggggtttctttatgtaacaaattgattctgcacttactactgttataacattctaaatgagatagtgtatttttcttgatacttaaatgataagaattaatgattttaattatcacagagaattccttaaagctgaggaagacataaatcatttaatatttagttaaatattaattaaaggagtatttaaaatataaagtcttttttcatacttatgtttaagaattacattaaagaggtttggagaaatacctcatcagttaaagcactggaggacctgggttcaattatcaacaccctcatggcagctcacaaccatctgtaactccagtcctatgggatcccacaccctcttctggcatctgtgggtacctggcaaacacacagtgcagggacatatatgcagacaaacatccatacacattaaataaataaagtcaataaggctggagagatggttcacctacagagagcatttattgctgtattagagcacttgctcttacagaggaccagagttcagttcccagtacccacgtggctgttcacaactgcctgcaactgtagtcccaagggatccaacaccctcttctgagctcatgggcaccaagcacatacatggtgcacagacatatatacaggcaaaatgcccatacatataaaataaaaataaatctaaaacaattttaatcatcaccatcattttatccgacctagatgtcagcttctccctgatcttagagccagtttatcaagtgtcatcatttgtttattcatgaaccaacagcttccattttcccaagaaaatactcctgttaaaattattgttcttaaatgtagtaatgctccctagtaatgcttaagggcaaaaaataaatcaaataaacaatcccaaataattttatatgtagaggaagtagaagcatgaaggggcatccaacataatccttgaccttaatcccttaagatttattttaaatccagcatggtggttcatgtctttaatcccagtacttgggaggtagaaacagagagatctctgtaagtttgaggccagactggctacatagtaagttctaggacagccagggatacatagagaaactgtctcaaaaaaaaaaaaattcttttaggccaaacttgttgacatcgtcagcccaaagacagcaatcaaacaatacaccttggcttctataaaattaggacctgctgcagcctttgtctattatctattacaaagaaattagaagcacctgcttccactcctaaaatgttcaatcaatggaggtgagccacactactttgtaaagccaaagtgtggtttacacactaggatattatcaccatctgcaaactcactaaaaaacacgttctcgagctacacttcaggcccaagtaaggaattctggaaatcagactcaacgttaaacttttacagatctttcagtcattcaagttaaccatatgctacaggaatacaaaaatattcattataccctggggaatcagcattactaaggtagaaattgtcagccagtggtggtgcatgccttttatccacaggcaggcagatctctctgagttcaaggccaggctggagctattacacagagaaaccctgtctagaaaacaaaaaataagagagaaaaagaaaggagagagagaaagaacaaaagaaggatagatagaaggcagaaattaaggaatgaaaactagccctgagccaaataagaatagcatgttcagattcaaactgatctgtagttggaaggggctccatcagctggtcatgggtcttccaaatcaaacacggggctatgcaagcccatgactctcataacatatctgacttgcttacaatgagtaccaatactgtacgagatctttaattgcccagtttaatcaagtctctacgtttcagttaattggaccagggaaagtccaatattggtgaatggccccagagacattctggtccatttatcctcagtaccataattccttttggcaaaacttctgaataattagccactgttcagacagtaaatgatgcaagcaaagccttgtcctgacacagttctgatacaggaaagagaaggtagttgacacagaagcagagaagtatttggaacttattcatatcttaattccatgaacaaatccaaacaatctcttcagaacaaaccatttgaaagcctcaaacctttaactcatacaacaaagttcttatttcttttctatctttgggtcttcattcaaaatatgttccatttttaccttgtctgggtttacagttccaacttggtttcttgctattgtgtacccttgggaaagttattctaaatctgtgactattcctcatgcataaaaacatgaacttagtgccttacctgtggttttaaaaactaaaaattttaggccctttgagtgctaaacacacacacacacacacacacacacacacacacacacacacacacacacacacaccccacccccacaaacacccataggaatcttctttgacaagtgccattatatccaccattctcttcatctagttcaatggccaaacctaaatatacaaataactgacattttcctcaatatacaaaatgaagttagatttgtttctttttagagatggggtctcactgtagtccacactacatggaactcacaatggaattacagatgcaagccaccaacccagttaactaaatcttttaaattttaaattgtgaattcattttctgcctcattttaagatgaaagtttctgtttcagaggggattattttctcagctataatggaaaattatactttaataccataatttcagtctgaaatttataaaaaataagtgaagagcatgtttcaacagcaaaacccaccctccatttgtcttaagtttttcaaaaagtatatactcagaatgtaaacattttgaaaaaaataaagagtttgaacaaactttttctccctatttggctggttttgttaatctgagatagggccttacttggtagctccaactgttcaccaatttgcaatcctccgatcttggcctccaagtattgggattacaggcatttactaccccactagcctcctattttacatggataggaaggaattctgaacaatgacaagtaaatgctattgtgatcattgggcttcatgcaagatttgtgattacacattatgtcttagagttcttaagaccatccataggcaagattcaccagactcatagaactcctcagaacacagcccatctatggctatgatctttcatgagccatctctccagcccataaacagacctttttaaggattgtagtcagaggtatgatgtcagtttgttcctagaaatgctaaaaataatcatttttacctatttgttggctgatgttttgggaagcagatgttaagatgaaggtaacagttcaaaaagatatggaaaattttaactaggtaataagggcctttagaccatgatgatggtcagttgtgtagagaaaaaggaaaagggggagtgtaggacatggaaggtgtcagagacctgggtaggtagtagctaacccaatactgaactcaggtacagaaatgaaccaaagcaccacactggtcagaaactgacaggccctagaagttctgtactcagaaagaagatgacctgggttcaaatgctgtgcttatagttgaaggttattttaactcaacttcttgaagctgatggctgaattctttctttgagctctgaatagggtacccaccaaggacactaagatgctactctgtacttttcatgtggttaccacacctattcctccaatctactctgctccctcatacattctacatagcacacgccaggagttattctaagtggctacagatttttataacaatcctatgacagagaaccctgcagatgaagtacagaagtaaaataacttatttaaatggtaagaagcagatgcttcaagctcattttgttctagaacccatactcttaaacaaaagcggataaattataccatgtggcttttaaagtcagtattattaacacattgccctaatagtattctcagctaagtaataaagtatagcttaattcgatttttttatattctgggttgtgagcctagcctttaatggctgagccatctctccagcccattaattcgattttttattttccttctggtaacttttcttcttggttgctgcttagtgttctagattctgtcagttataaaactcgtctgtactccaaagctacacagagaaaccctgtctcaaaaaaacaaaaaacaaaaaacaaaaacaaacgtctataattagttttttagaatttctaattattcattttggattttcaaaattcctttcctagaatgttctgtctttcctatctgaatggtctatgccaattccaatatttcatggtggcatctccttccattttctattatgttaaatacatttcttatatactctacacctctttcttgggttaaacacagtacagtagaaatgactaacctgctccctaacacaaattaaccaagtcaaacatcccaggccccattcacatgccaacttccaaagtacccagtacacttaatgcctgagcctttctaatgttctccaatgccagtttgtttctggtccaaggatttcagctttttctggaatgttgccagatcctaaaagtcatcccaattagtcactacctgggaatcaccaggaaagagaagacattgtgacagatctttaaaatactatagttgactgttatcagctaactcttgaagctcatcagaattcttttctggagataaaagcagggtgtccaccaaggtcactatagacacatataaggcattcaaccaaatagttcttagctttcaaaattctgtgctttcttttctgtcctcacagggggtcatttacttattcttttactgtcttctaggaaggtacagaaaagttaaacaaacccatgcatcttactctggacgtttaactggaaatatgcatttgtcatgtcatgctgtagtatgggctttcattgaattcactaagtagcctagctggactacaaattaatgcttcttctgcccacagactcccaagtacaataatacccataattttaatctatctttagagtcatttcttcttaccacacacccttggcaatctagtcatatatatctactctcgagctcattttatacttctcccactgttttccttccagatcacagaaatacacccttctctagcttgtattccaattgtaaatacttgatcacagcactaacagtaaaatgccaagttttcactgagaagaaggcaggtagcctgttgcactttacaacacttgggatataacacactgaaaatgggaacattttcagcttgttaaggaaaaaaaaaaacaaaaaaaccatctgcttttatataattaaactgcttttaatttttttcatttcatgtgtatgagtgttttgccagcctatatgtatgtgggccatgtgcaggttaaaaaacaaacaaacccatgcatctctctctggatgtttaactagaaatgtgtatttgtcatctatgctgtcctagtctccagaggccaaaagaaggcaaccacggctggaattggagttatgtatggttctgaggtcatcttgtacatgctgggaactgagcattggtcctatacaagagaactaactgttcttaacctctgagctatttctccagctccaacgtttcttaatcaattatcatacacagtaaccactatatttgaaattgatttttgattatgctagtcctcttcttcccaagaatccttggcctaagtagttaggtggcaaattcattggtctgtttgcatcactgtaacaaaacagccgaggtttcaaaatttcataaagagttttttttaattatttttagtttgtgttctggtcataattcaagatcaggtaggctccactaatttttctctggtgaagaattaacagcagatttgtcatagtgatgtagcacaatagtgacagcatgtttgagaggaagtaaacccaccttgaaatataaagtcaaaagcctaagtcccataatacatttcatgggcatccctccaattgagctacagacttaaaagtaggttccaacctaaaaaagttggtcaaaacagttctcactctgtcacaatcaattagctgcaatcacacgcatccttgggtaatagacttaagctatatccaaactatatctatgagaacagaaatgtatgcagtgctaagaacaatatacttaaacttttgtcttcagtgttcttaaaatatcaagtaaaatatctgtaagtagctaaaattttaattataccagaatttgataaagtctatttaagtgcaggcaattgctaacatagcattccctttcccatgaggcttgaaattattgcaaattggtccaggcaactatttctttcagaatttacactgagaaaaactgatggtgtaaaagacaccaaataatctagggaaaatggaagcttaaacaacttctaaacaaattaacatattcataaggaaatggagcaatgggtcaagggcaactttccttactactgtaccaagaggacaatcttcattcttataggaagaagaacctaaggtcctttcctatttctcagaacctggaagtcaaggcattattccacagatccaagtaggtacatcttggattttatagcactttggtgaaattcagattcccaataaacatttaataaaccaaaagcttaagttttcccaataaagttgctttgccccaaatgtaataaaattctttgagttacccttcagagtatgtgcttttaattattaaatgacatccttatcaactaaaaacaactcattttagctaacagctattgattagtagagtctacagaattccattccaggggaacagaaataggtttgcattcaatactgaaatttcattttagtaagtggcttgtaagctaaaaattccaagattcaaaacttttagacaaagcagttaccaatgaaactatctcttcaaaacactgctttctgaaagaaatatgatgaaataaggacaccattcatctgtaggcatgttctaatttagaaaatctttaatatcaaactgcatgcaaaagaaaacatttcatattttaacagaaaacattatgacatcccataccttaaatttagagcttacagacaacaggttacttagaactacttatattgggattttacaaattgtatgccaatacaactcactttcaaacacattagcaatgatgaattattatttttataaagatagaaacacaatttggttaaacacgtctaagccaaaagatacttaccaaaataatgtgagtttattcaatagtttaaaaaggcagagcattccactgttaggtattttttcaaagttgtaataaaaaaagacacacttcaagtaaatgtttatgtaaggaaattaaattttaaaaaaggtttaagttttaaagcaagcaaatattattctatttagtgcacacactattaaactgctctgagatgttctcttggaactcactctgtagaccaggctggccttgaactcagagatccaccctgtacccagggccttgtgctcactaggtaaacaccaccattgagctacattaccccagtctctgagttctcattacagccataaataagtgcatccctcattcctcatcagagaagcatattttggcatatggtgattaatacagactcacagctgattagttggtagagagtaaggttgtcttagtgcccagctctaaatggatgtacctattacaacctcctccccaaggcactgggtttatcatagaagagaggatggaaagattatattaagagccaccagtaaggaatgttcctagaaccacataaaccagtgtggcaccatgtttcttagccccatattcacactgaagagaaggttggagtagagttagttaaagataatccttgactacacagaagtttgaagctaacttaggatatatgagaccatgctctaaaacaacaaaaagttttcaaacaggcctcatctttctccagtaatcaggactttgtagtgtgagccaagtgagataactgccctcacaggtaaattgtgtatgctcattaataatgagtgtttaaaaaacaaaacaaaacaaaaacaaaaaaacaccttgaggattcatcaaaatctaaatctccggataataaatttccctccaaataccatgttgataagagttctaaaaaacaaggaataatagtcaagtctagggaagctacaaacaactacttttgtaccaggcactttgttaactgcacatacctttagctgtggcaggatgtcaatcacagctaatagcctaatctaggctgtaatacgacaagctatacactcttcctaagaagtctttggcctatgttcatcaaggaatcttcagaagagatattcactaatgtcaaaaaaacacatcttaaaatatgtcagtatgactttgcatgaactcaatctctgtctctgtctctctctaatatataatttctttttctgagttttgaaacaggccctctccacatagtcctggctgtcctggaactcactatgtagaccaagctggacctgaactcagagatccatctgcctctgcctctgcctcctgagtgctgggattaatggtttatgccaccatgcctaacttgtatttataattctgagaaagaaaatatcaatgatttcaagttttcttggtttgtttttaaagtctttctacctaaaaaaaaacttaattatgaaacatttatcatttttcatgtagattaagaattgttagctctgccctgagtagaaaggaattgaaaacgaaagggaataccaatttaacctttatctgattcaagtaattttgtttcaattagtctccttttgtagagaattcatttggtctgataatatagaagacctgacttttactataaaaatagcttttcaaaggactcggggtttacatcagtagtagactatttgcctagtttactattgccccaaattcaatctccaatatagggagtgagttgttgtttatccaggcattataattctagaactctggaaactgtctggaaaatcacaattccagaaattggaggactctgcctccaaagtaattattaattaaaatgtaaacaacttgagtaattaaattttaaagtgatgatcagatgcttatcatctaagaattcctttgttaaatttccctcagtgttaaatcacaatttatgtaagctctattgcacttgtccaatccactgcagcactcacaagttaaatctgcaattaaaaaaataactgaatgtaaacacagttcactgcacttgggaggcagaggcaggtggatctctttaagttcaaggccagccagcctacaaatagttccaggagacaatagacaatagtattatacagagaaactgtcctgaaaagccaccaaaaaaccaaaaccaaaaccaaaacctccaaacccaaaccagatcattgagaaaaatgtagtgcttaatcagtatcataaaaaggatgattggtagcctatctgaaatatgaagtgttctgaaaataaaaattatagtgaagatgaaagtcacttagtgtaactactaactttacaaattctctttgcaatctatcttctacagctaacaacaaccattgcttattcaatggcaatgtcaagtcaaaccattctttcttttcagagatgtgaggtttgggtgctactgtagtgtttgtacagaacctccttcgagatgaagcttttacaataaaagcttagcacgattcaagttcttcaagttaaagatttagttctcaattgttcttcatgacagtttcacattcttacattttaagttttactctgaatatgagcctgattttataggtgctatattaaacacaggagctagaagacaatattccacatagggaacaacaaccagtccagactgaagcaccacctatttgacagtcacattctactgcctcactaggatcttgtgacccagccaaaataattaactacagcttgtacagtggcattagcctgtacccacagctactttggaagccaaaacaagatggctgtttgagaccaagagtttggggttaaactgagtaacaaaactgatcctgtctcttttgtttctttggctatgttgtttattttaaaactagtatcttagctaggcctggtggcatacacctttaatcccagaactcgggaggcagagacaggaagatctctgagttcaacgccagccttgtctacagaatgagttccaggacagccagggctacaatacagagaagccctgtattaaaataaacaaatgaaaacctggagtctttatttgtggctcagagaggccttaaactcatgatacttcctcatctgcttcccatgtgctggtagtattcacatgtgcctcaggaatgatggactacatgtaaaaataaaaaaggtttaaaatctgtttatttgggacagcaggaggagaggtgaaagggaggttggaattagaatgaaatttaaaaacataaatttaaaattttatgtttatatttgtactactagaccaatacttttcaatgcattctccatccaaagatgaacttgtctgatgatgattaaagtcaacaagtagttcattctattttagagttcattttttctaatgaccataaaggcttaacaaaaattactaccacctccatgttatgccataatgatccatcttacatgcttctaccagacttctgttaccaaggactttgttacaggagctcaactgtttaatacatactacaccacattttacatagctgttttctttttgtaaaatgtgtgatgacgtttatcttccactaagtttctgatagtttttgtttctcaaaagtccagctatataattatcttgaagttgccagatgtgaagcatttaattctatcacgcaagatttactgtagacttcctgtgcatgttgatttgactcacttctagtattaattctaatcaacaagactttcaacattaaaaaacttcagctaactatgaaggttttcatgttttatgttctaaaaccaaactaaagcacacatcctctactattctgaagtagtgttacttctaaaccattttccagggcctctaaaattataaaattgaataaacactggtttactttgtgtttaatgcttaaggttctatccctacctgtgcctgccaaatgataaaatgtattagacagaataaaatctcaggtagcagttttccaaattatttttttagtttaatcaaaagataaagctccaggctagaaaggcaactcagtgattaagagtacttgctgctccttcagaggatctgggttcaattctgatcacccacaatgcagctcacaactggttgtttattgttactgatttcttttatgtttacttactataaaactaaagaacaaaatttaagataataacctgaggtgggtcgcaagctactgcagaaaaattctatcgcttgcttccccaatgtccatccctaatgaaaacccagcctcgtagaccaaatgctcctttcaattggctagcagaccagtcagtaacagaattgctatagtatttccccctttttgtctaattgagaaggaaagattctaactctaacacagtaaaagtatatacagtaagaactaccaagtattgtccaaataaaaaggaagggtagtaaccttaacaaaaaactatatgcaagaacaattatcaagtaagaaatgcattttcaatgtctagtccataggattggcaaatttatacagattattccattagctgttctttcctgaagagtccaaagttttgtatgtaatatgcttttagtcaagatttgagagaactgtaaccatttagtcttcaaccccatcaaagacctgtgaaggaaatattatttgagtaagcaggaagtgcaagcaagcaacttccaaaaactgtgagaaatgacgcaaactgctggctgcctggacattacccaaggttcctctgcaacactggggcatccatctttggcctataggcctagagcacctgacagaatttttaatagaaacacaaaattttgagggactgttttatcctgtcttggcaaatttcgacagtcacctttctttgtgtcttgcttgtccagtttggacagcatactgtcagcagttgaggcaagggcagtttcttgccctaatgattaacttttgccacaaagaaagcaaagttcatatggaatttcttcgatgcccatcatcctctttaaaagtagacaggcgtcgtcaagagcagatgtgtctcatgtcaagaaaagtctaagttattaaagcattttacatggcatattctgtaggtctttgaagcattggaagattagctatctgaaaaatgtctgtatacctagaaacctaattacatgactacaagtttgatagttatgggtgtcagcctatatttctttattattttaaatagcttttaatgactaaaacttcacattacataattaaacaagccgtataggtaataccttaagcaaaaatagaaagagatgtatagtatgaggatgacaccctcaaatttgtaacaatatacaaatatcttaaacagaagtagaaaccttagagtgtaacaaaaataaaatttatagaaatatacaaaagttcatactactataagttatttaagactagtagatgctttttttagtttgaaagtagattcaataatctacctttatagcctatcatagctatcccccattttttattaaccatccccagtaacaactcctaaccaatctcccctacatgatgacaaacatctataacccccacctcttgggaatgtgggtggcatgatcttaaaatcacatcctgttgtctggaggggggagttatggcatctctagggagaccctgaaaaacctgaaacaatcgtcaagtcctgggaaaaatagctgtatcatttgttgccagtttctgggcaatgggaaaccatagggcttatctgaagtcctggctggaggagtgcatgagggtggacgatctcagctagccactttggaattatcctaagcagtttgtgtccaaagctgatctttgtgtggtgtttatcagcttagtggcattatcaaaatccaggtagaatcatcatctttttggaggcttcagagatcactgttagaaatgcttattattcattgcagaaaacttaaaacatgttaaatgtcacatgctgtaaatctcagggaggtcaaaggattatgattaaatacccctggatatttaaatattaaatatttaatattaaataaatattaaatatgccctggatattggataaaatatctgtttaaattcacgtacaggaagctacacgaagcctaaggttagaatcaagttagtactttataatattaatatcaaaacaaagttctttttattggtaattttcatatggttttaccttttcttcccgatgtctcatttgtccagaggtctttagattcctcagttggatgtttttattttcatggaaaaacaaaaacaaaacccttcccaacctaatttggtaagttttcccattcatcaggttgaactgcctcatcagctggtgaactatcacctctcctaatcaaggtctctcacgttcgaatcaaatctttatcaattttgatcataaccacagtttttcttcttatgcagaaacaaaagcaaaacctcttttccaatgtaacacatatccgggtttccattctgagttcaacacatctttaaagtatactggctgatttagttcagtggggttttttgtttatttttatccagtgtccctctgcagatgttgttcccttgtctttagcattaaaaatttagtcaataaagcattgtacacaatctatctctaagggtcattattatccttttttgtttattaagtatttttaaaaagtgcaactagatctttctataattgcttatactgtgggattgtgtaatatgtgttatgctgtaatatgcaaaaaaccctttcattttactagagacacaagctggagtattgtcagtcttagtttgtacaagtattcccaagatggccataacttctaatagatgtgtaattatagactcagcctttttagaactcaaagcagttacccactgaaattctgaatatgtatctatggtatggtttacatattttaattttccgaactctgcaaaatgaaacccattcatttcccaaatctcattgttgttaatctttcccccaaaatgactgaaagctctttgtagatgttcattttctatccataaagaggaaatgttgcattagcaaaagatactacaatttctgttggttccattcctgttcattgacaaaagtctaaattttccttttaaaatctattcagaaaccttttctacatatgtcttcaattttttgctttgtttgtgtggcaaaaatacctattccagaatattattttctctctgggtaagaatttcagtgggagaatgggtggaaggtagaataaataggatacaatcaaactctggatccaagtgatccacatgtgcatcctgtaatttttttctctaccagagtcaattctctttcaacttccgctgataattttcttagactatctgaggccctgtcaccttcatctctttaccaggtagtccactgtaactgaggatcagattccactactgctgcaactaaatctttccagtcttgtggagtaattctgttccaagtggaccgtgaatttaacatctgcctcacaaaaggtgagtgtataccatatcaaactattacttccttaaatctcttcaaatctaacctttctaaaggatcccagttaacttctgaatagcctggtggttgttcttaaatggtatctggataaattaaagtttgttttccaataaccttgggctacttatctctaatttaatgatgtactggtggattggttctcctctaaattcttctctctgtatccgaatattttattatctgttttaataaatttttctaaggcttgtaacttatcagcccaaatggtactttcttcagtaattatttatagggcttgaatattatcaatagtaaccttttctgaggcttgcatcttcttgaatagtatgtttttttaaggtttgcataaccagatttttactctctttatcagtacatatttgtaaagctgttatttaacagtcaaaactgtattattctccttagaattatctgcaaggcttgcatatttaacagtaggaggattaggttgtacagatgtagtgatgatgtttgaccagcaggcagagaggatgcttggaggactgggctgtgcagtatttcaaatgtagtgatgatgtttgaccagcaagtggagcaggtgcagcaccatggcagcaattggaggtccaggaagagggaagctgcactgactcaacactataatctgactgtcatcaagctggtgctaacccatggtgacaaaattgaggaggttcatccaagcagccaggcagaactggccccagagttgtggctatgttaagtaccttgactttctgtccactgccagcgacttggcaatagtagacgcaaagttccaagtctcaaaagggtctcgaggaggtggaactcaagagctgagctgcctgaatttgcatcagagaacccactaattcgggaaaacaggacaaaggagctggcggaaggatgctcaccctccatcacagagtggcacagtagttggatgcctcacatatttttagcaatgccaaactttgggcattagatgttaccgatttcctttttgcttatttattacaaaactaaagaacaaaatattttaagataaaaagctgaggtgggtcaggttttttcctggcttgaaaagacccatgtcccaccccctccccagatcacatccatccccaatgaaaactccacctcttggaccaaaacactcttctcaacaggctagcggaccagtgacagaattcccattaaaacactctgtaactccatttccagagaatcctatgccttcttctgtactttatgggcaccaggcacacaagtggtacacagacagaaagctgacacacattaatttttttaaaaaaattaagataatactctttcaagaacttagacattacttgttgacagtagacaagtctaccactatagtaacttgtcgccatgccctatgccacagcatttatttatcatcagttcactgactccagaccctttctatactagcaccaactcaccaatattgccagtcctggccaaacccattatctttatatgcattctcagtgttgattctactactgtggagtaaaattaaaaacaatacaatgactcatttgagataagtagtatgggtaggttagcccaaaccttaagtatcagaagagcaaaaattttatctacttttgcttccatatatcctggaaattgagtttctgccaagttgttgccttctttttaaaaattctattattattcttagtatttttatcatcatcattattattatacttgtatgggtgtttgggctacatgtatatctgggtaccacatgcattcctggttccccacagaggccaaaagagggccttggatgccgtggaactatagttatagacagttgtaacacgtgggaattgaagctgggtcctctggaagagcagtcagtgctcctaacctctaggtgatcttttcagctgcccctactaagttttcttataaccaatttatactagaaaaatatacactcactctaaggtttgagttcatagcatgtgacaagaattttctgtgtgcttaataatatttaagtggggctggagagatggctcagagattaagagcgccaactgctcttccagaggtcctgagttcaattcccagcaaccacatggtggctcacaaccatccattatgagatctggtgccctcttctggtgtgcagatatacacggaagcagaatgttgtatacataataaataaataaataaataaataaataaataaataaaatattttaaaaataatatttaagtgtatccaaataactttttgttccatatttttaataagaaaatttggtgctagaatctggactctctaggccaagttccatcataatatttcagatcattatttaaagaaggaaggcggctagagcatgacttgtcagtgcatatgagacttgttaatttggagtaagagtggtaaaaaaattctaaattttgtggtaatgcataatcctgtgaatgtattaaaaagcaatgaatcatttccttcaaatgagtaatctgcatgtaaattatctcaataaaaagcagttctatattttgcctcattctaatgtatgctataagatgcttcctaagatattaaatgtaaccaacagacaaagagaaacctgaacgtcctaaaataagccaatagtacaagtctcttaaaagccagagatgactaacagttaaagggcccttacttgttggataacaatcactaagcaagcagaaacaaaaagactgaacatgacctctaaataatttcttcggaaagactattcaaaatatcttgaaatgcaaagctttgcttctatacacgaaaacatgaatgaagtcctcaataatatgagcacttactcatcatactcgatatgataaataacgtcttcatcagcagcaacagagtctgaattagacgtagagggtacattgtccaatttatttgtgttctctttggtattatgatttacatttccattagtccttttataagaattgccattcttcagtggagttttgccacgtgaatgtccatcagaagctctagtaacactatgtatatgtgcttcaaaccaagcaccaaggccggcatctctggcatccaccaattcatttacctaaaaaaagtttaaaattagttaatgaagcttaatttcatctactgcttcaaaaactttaatataactcaagttatttgagagttattatagtaaacattatatattgcttctcatgtgtgaaatgattacagattagatcatggctattcttttaagttttgttgtactaccttaatcttatatttactaatagaaaagttgaacttcttcccaatttccttcagtgaaaatgttttaattctttcatacccatgtctacattctacttttgaaaacagtgattatgtatctaggagtcatgtaagaacaccactaatacagaaccagcacttttagctattaagacagcaatttgttctattaatttcttcataaccttaaaaataacttacacaacagttcaaacagaagctaagtgaaaataaaagttgaaaaggaaaggattattcataaaggacaacaggaagagtctgctaaactaacatatacaaactggggaaagttctaccttacaatcacagggcaaatatatccacttatcacatcaaagaacaaagacaaagtgtaaagagagaggtataagacacaatatgtccagtaatgatccagatctagccaacaagttttacaaacagcagttattgaaaaatatgtacatcagaatcaagaaacagaggcaggttaaaagatttcttctagtactttctgttggactggatttgtaaatagataatagcttaatttaattttatcatggaatatcttgttttctccttctgtggcgactaaaatttttgctggctatagttgtctcttaagagtccaaaggacatctgtccaggcccttctggcttttacagtttccactgagaagtcaggtgttacagagacaaaaaaaaacaagtatcaggtggagagagagagcccaaactggagatatctccatcaggtctctcccctcagaactcaaggaaaccatggaagaggagaaggaagaattgtaggggtcagaagggtcaggacaccaggagaacatggcccacagacatcaactaagtagggtttgaaagggctcaaagagactgaagcaaccatcacagagattgcatgggtctgtggtaggtcctctgcatatatcatttggctgttagcttggtggttttgtggggctcctaacagtagaagtgggggtatctctgactctttcatctactcttgggacccttttcctcctactgggttgcctcgcccagccttgatataagggtatggccctaatcgtattgtatcttgttatgcagtgtttggtggatatccctaggaggcctactcttttctgaagggaaccataagaatggataggaattagaggggaggtggggggagaaactggggagaggaagagggaggggaaactgtagtcaggatgttctgaaaacaaaatattctcaaaaggtaaggtcactggtaaaaggcaggtttgttttctttggggggggttaggagagaaaacttttgaagctttctttttttaagtctttacaaagaaaatatgaaatcgctaacacatggtcatcatctcaatctagctttcacttcaaggtgaaagaaacccacttaatataattctaacagatggtgatggctaatttttattgtcaacttgatacaacctagaatcaccagggaagacagaagcttaaaccaagagctgcttcaatcagactggcctgtgcaaatgtctgtgagacactatcttgattgatgcgtgatataggagggcctggccctttgtgggaggcactatccctaggtcagcaggtctgagatatataagaaagctagcagaaccattcccaaacccagagaattaagtaacaaaggggggtgcagcacaaatctcaatgggaaggggaaatagaatggatatttcaggtggactgggggcaggaacagaaaggatcgggttggggaggggagagagagagaatactgagagtgatgactggaattgggaggaatttcagggtgagacagaaacctagtgcaatggaaactctcaggaacctatgaggatggcctagcaaagacagctagtaatggggaataaggagcttaaacaagccatcttctgtaaccaggcatggcttccagaggaggtactgggtcaccaacctagccacaaaacctttgacctacaatttgtcaggccacgagatgtgctgggttaagaagagtggtgaagaaattctgagagtggccaaccaatgactgggcaagcttgagacccatgccacaagagggagcatacccctgatactgcctatatggccaggaaccagaggatggatagccaagagtcctaggataaaactaaacataactggcataaataaataagcaaacaaataaataaatagatgtcaatgaaatgattcctaattacattctgctgtattcatagatcagtggttagcccaaccatcatcagagaggcttcatccaccaaccaacagagcatatccagaaacccacagccaaacactaggtggagctcagggaatactggggaagtgggggaagggaggaaggatcatagaagccaggagtcaaggacacaagaaaacccacagaatcaacttacctgaactcatagggggttcacagagactaaatcaacaataggaagcctgcatttacatacagctctctcttaattattaaccattaactattaatttgtgtatcttcacatagccttatcttaccagagaatgcctaggtgttcaaccttcccagtggctatatggtatctccctctagtctgatccctacctttcctcttcccagattcttatctggtagccctgcctatacttcctgcctggctactggtcaactggcattgattcatcaaccaataagagaaacatatactcacagcacccagaagggcattcccccatcacctctgcatatatgttatgcttatgtagcatggtcttcttgtggtactcctaacactgggagcaggactgtctctgactcttttgcctgctttttggacccttttcttcatactggtttgccttgtccagctttaataaggggagggaaggtgttgagtcttattgcaacttgatatgccatgtttggtttatatccctgagggaaaggaggaggagcctgtctgagggagagaggtggggaactgggaggagaagaggggaaactgcagttgggctgtaatttataaaagaacaaattttaaaaagaataaagctaacagacagaaagctagagagatgagtctaagcggcctttccccatggtttctgctttagttcctattttgagttcttgccccaattttcctcaataatggactgtaacaaggaagtgtaagccaaatcagccctgtctgcttcaagttgctttgatcaatgttttatcacagcaacagaaagcaaactagaacacagatggtgtatcttggaaatgaaagtgtgttctagaaaaatttatacccacatatgccaggtagtatgtaatgttcttcacttaggtttgcttaatcataatgattctatcaattactactttataaagaaacaaaggcatcgttagcttgttgtaggcaaaagtgtgcatttcaccattatattaagaagcttgttaaatctgacaagataagggaggggaggggaggggaggagaggggaggggaagggaggggaggggaggtagaataactactactactactactactaccactaatgatactactaatggtcaagtaagttaggtataacagaatcagagatggaatatactatttactacagaaattgatttatatattaaatgaagagacttacttcttccacaatagtaactgacaaattttaaagacagtctcttgtaagtaacagagctaaaacaaaaataaccaatgctaaagtttataagaataaataagttactctttactcacaataagccaaaacatggtgtttcatttagcactccaactgtatcataacagggaatatgatatatggtcgacagtaaaacaacagcagtaaaaaacacacatttagcctcaagtatgagtggagtggtatactctgtaatcctagcactctggaaacttaggctagaggatcacaagttcacagccaacctaggctttataggagaagtttgtctcacacacacacacacacacacacacacacacacacacacacacacacacacaccaaccacatgaatataaactccactatggatcagtaggcagtcaaaatgaaatgctaaaatttgcctagcagtatttaaaaaccagcacacagagataatatttagataacctaaaataagatgtattagttcataaagatagggattattatttgagtagaataaatctacacttagagctggaaactgaagttttattagcctattcaccatagcaagccatttgcaataatacataaaaacgtggctggcagtgcttttaaattgtaaatatattgtaaaatacatatacatgctaaggacaaatttaaataggttaaattgcatgtaggagataaaacttttgtagagcctgggtttgatgacagttcagaacgcaaattattaaaccacaaaattaacacaaaaacagaatactgtcatggtatccttttaagtaacttagtaggaactaagaacaaaaagaagagagtggcaaaacttaaagagacatctggtagcatgttcttgtaaccccaacccaagggaggctaaggcagaacaatgccagtcagagttacataatgagaccctgtttcaaaatgtgaagacacagcatgacaaacagagggggataatgtatgagtaaaagtgttcaaagtatatacacatgattttaacttatagcattaaaatgaaaaaatagagatgttaagtgttattaaaagaaaatttcaattcaaggcccacatagcaaagcatgaggtttgctcaagagacagaaaaaaaacaagagaaatcacagtccagtgcttttactgtgtcttctttgggacaaagcagggcaggacggggcaaatgatctaagactactgagggtgaatgtgacaacaagcttcagactattggggaggtctctagctgtctgacaactagagatgatcaaaacagagtagtgtctcaacgtgtgtgacagagaaaggaggggtggttgggatagggactcaaaattatctactgtatataaaagacatgctttctgacaatatgtcacttatttgtaggaattcacaaaacaaaagaattctctagttctaggaaaggcagtctcttccctgccagtaagatttcttcacagatgcccaaatagcaaaaaaatacagtattttatatatttaaaaactacacgaatttgtataaatgaatagttgtttaggactagaatttggaatggagtggaaaagtcactcacaataacttaagagctgaccttattcttatttaaaaatatagctataaacaccaagtgtggtagtacacacttgtaatcccacaaggtttaagtatacatgtccatttgcaccttaaaagacaaagacataaaaggctttaaaacaaaacaaaacaaaaaccaaaacttgcatttttttgttcagatgatcaaagccagtgtgtatatgtgtagcacaaataaataaaagacccagagacagatactgaggttcaagctctaagctgaagttcagaaaagcaaagcatccagccactagctctcaccactacctcagactgctgtctcgcctcagtgtggctggagaatcctcaatgtggctggagaatgaaggtccctatcctcaatgtgaatgccttataaacctctcatgagtactgggattaaaggtgtgagctatataattctcttttagacagattcaatcttgtgtgattcttcgtggtcttggactcaagagatttgtctatctcttaatcctgagtcctaggattaaaggtgtgtaccaccatctcctagcttctggctgctgagattaaaggcgtgtgcctggattctatggcttgtggttgactttgctttctgaatccttgggcaagctttaataaatcataaatatcactacatatatgtgtgttaatagaaaggatcataattaaaccttcttttgaaagatggtggtgtgtgcctataatacaagtcctctcaatactggggcacaataagtgcaagatagcctgggctacatattgagattttgtctcaaaacatagaaaacaagcaagcagaaaatacacatgtatatacatacacatatacatatataatctccacatagaaaaagccacccatacttgctatttaattaaaatcactaaatttttaaaagagaaagatagaaaaactaaagcataagaatcaaggttaactaaaaattaagatattatggaacatcaaatactagaaggattactgctcatcaagctttgtctgaacacaactctggtactagggactgaacctacacatgctaggcaagtactgtactactgaactacagaataaccttttttaaaaaaaaaggtcctcctcacggtgtgcccacgccctgaacttccaattctctagcttcagtctgagtacctagggctacagatttgaactaccaggcctaactcttttactttttcttttcattttttccttcatctttgagggtaatagtggggaacatgatctcactctgttgcccaggctgcctgaaacttgtgatgtaaaattttaggctggctttgaatttgcaatcccgtcttagcctcccaagtagttcagaccatcaaatacatttctaaacacttactttgttctgtggaaaaacaaagctctgcagataaatcagcattcatgtcttttaatgatataatctttaaatagtaattttgtcccggcctcatacttttgcagttttaaaatatacctatcaatgcatttcagaatacccaacccactaagcacacaattaatgtgtacagattaaacaactgtcttttttcactaagcattagcatatccaaatttgactcattaaaacttggcaatcttatttgccatcgtctgctcagtaaacagcagtttttgattatataattacttcatttaataactgtactatgaaatcattcccgatttccaataaagtatagacatgaagcgtatgtgtcctcaaaggacatacagtgaagagttggaggaatggtgggaaagcacctgcagcatcagcatgaggacctaaacttgaatatcaggaacccacataaagctgctcacagtaagacaaagctgtaatcccagttcttctatgcaagatgggaaacagagacaagacaactcccaaaagcctgggaaccagacagcctgaagtatacagcagtgaacaataaaaagactatctcaaacaaggtaggaaggaaagaccaacacccaaggctgtcctccaaccttcacatgtgtgccttggcacccgcacttaacatacatgaacatacacatatacatacatctggtataacataaaatacataaagttaaaaaatagagtgatgttgggaacatgggtttcttcaactctaaacatgaccctttcataatatctaattggaaatacaaattttaaaaatgaaatattttttcatttacataaaactcagaaacagccaaattaggattgcataaacatgttagatgttagtaagttgttaaaaactgcaaaagaccacagaaaagactactgcagatgtttgggtgatggtttcaagaaaagaatatggaattaggggctagagaaggctcagtagttcagagaactcactgttcttcccaaggactcaggttatctcacttcaaacatagatatacaaatgcatgtatacagttaaaaaacagatatagaaatgcatgtatacagttaaaaacatagatatacaaatgcatgtatacagttaaaaagaaaatgctctaaggatatgaaattacaattaggaaaaggaacatagggaattcttggggtatgctattattctgtttgatcattcgggtgctgcttagaaatgtttatagtatttcattaaactgttctttgcatgttactattacattgtactatagacaaatggacacaacatactaaaatatcaacacctttacatggattattgatcatttctcttttttctatatttcccaaggaacaaaaatggcatgcaaaaatttactacaccttcagctaaatttaaatgcttagcattttaaacacatcatttagactggatgacaactatttcaaagtcagaaacatacttgaaccatagaaactttcctcattcataaacaaaaaaaattaagtatgaaagtctaccatctttctgaaaataaacgtattcataacctagtttcagtgattcaatatatgtacaacgaaaaataggaatggataatcctggctcctacacaaacatctccaggttcttcaaataggtttggtaataactagctcctcacagtaacatgcagcaaactgaaagttggtcacgtattgctcaaggttagcaaatacagcaatataataatgatgctgaataaatgaaaacttaatgccagctttaaaattagtctgaaaattcaccagctcctcttgctatcaaacaatatttaagtcaaaaggaagggggggagaagatttgtttgtgtcctacaaagaaattttaattatagaactgtataactgaaaaatgggaaatctgaagctacgaggtgttaagtagttgagttgtagaccaagtcttaaaaatcacaaggtcttgggttatagtcccagcactgttcccactacccttaaaaacctccctacaaaacaaaatgacatagacccccccacacacacatattcaagatgaagggaagcttctgaattgtttgttgatttatttttggaagcagggtctcactacataaccctggcttagccaaaaactccttattgtagaccaattcaaccttatgttaaacttacagagatccatctgcctctatctctggaattaaaagtgaagatcaacatgtccagatacttcccagattttaacaacaaaaattttatatactaactaatcaaaattccattacaggaaagaaattcagaaataattaaaaataacagctttttccccaggtttactttgtgtgagtggtttacctatttgtctttatgtgcaccatgtgcatacagttctcacaaaggctagaaagagtgtgtcagaaccttttggaatggagttacagatggttgcaaaattagcaaatgctcttaactgctaagccactcttctagccccaaagtaatagcatttaaaaatgttttcagtttaccaacaaaaattaacagctaaattttcaggagtcagagcaaaatatcatttgtctacttctctgttcctaatacctaaacaaatgtacactaaatacacaaatattcatggaataaatcaactatccagaaataagcacttctagagcaacagacaaaacttcaaaaattctttaacagtcacttcattttaaactgaaaagggaaacgaatcttggtttctgcagctaataaagctaattatgtgcaattttaaaatattagagtatggccaggcagtggtggcaaacacctttaatcccagcactcaggaagcagaggcagacagatttctgtgagtttgaggtcagcctggtctacagggagagttccaggataggctccaaaactacagagaaaccctgtcttgaaaaaccaaataaaaaaattatagtatgaataccatagtagcctttttagatcaagtgccaggtccacaatgttcctaaacggaaaaaataaactgccttgtaaaagtttatacaactactgaacaatttaactagaatttgaaaccagctttgacagtgaagtctctttttgccccaaatggccagaccatgtagtaacaaagatacttagcatctatattatatattaacatgaaatatatgaactattaaataaagcctgacaacggtacacaccaaaatttgggtttgctaaggcaaaaggttcacaagttcaaggacaacctggactaaatactgaagactctacctcaaaaccatcaaattagttgacaatcaaagcattaacatagaaaataagagaaatctgacaagaaagctagtttcttatgaaactaggaaaaggaacagaagtttgcaagagcaaaagaactgctaagtacataagtgtctactgtctcttctaggaaaatgagtttatcccttcactgccttcaaaagcagtagcttctgaccaagtatgatgatgtgcatctgtaactccagtgttgggggggggggcaggaggagctggattttgagtccggcctcaggcataacctgatttaacacaacagaaaaactatcaatggtgtctctaccaccctacccccaccccaccttccaaaaaggtaagaagtagtacagaagagatgattcagcagttactagcactcctacgcttgcagaaaatccagttttggtttctaatacacaaactatgacttacaatagtctgtaactccagtttcaaggcttctggtgctgtcttgtagcctcagtggacattgcatgcacatggcatacatacatacatgtaagaaaatgttcatattcataaaatagaaataaaaatatttttaaaaaggtaaaaagtaataataattaaagtttaatacagacaccaacagtgacatatatattcagctacagtatgtgtgaatatatacacatccacaaaattatttttaaaaatttccttgctcagttatcaggcctctgataacccaggaacaaggaacaacatacaaaaccttaaaaatactttaaaaatgattccttaatgtgattacttaaatgtttattataattttgactcagcacccttttacttttttttttttggggggggggtttcaagacagggtttctctgtgtagctttagagcctatcctggcactcgctctggagaccaggctggcctcgaactcacagagatccacctgcctctgcctcccgagtgctgggattaaaggtgtgcaccaccaatgcccggcttcctaatctttttttagtggtttgcttccaactaccactacacatgaaaacttagattatagcaagtatatttaatattggatcactgttctacttaagaacttcataagattagctgggcatggtgtcaggcatttgtaactccagtgcttggggatgggggtagtaacaggcagcctactcaatcacttgggctctaggctcagagagagacactgtcttacaaaataaggttgaaagtaatgagaaacatatccaacattgacttctggcctcaataaacaaatgcacatatgcacacacaaacccacataaacacatacacactctgaggaggaaggaaaaagagaaaccagtgtcccttggagaatggctcgttacatcactgtaacaggaaatatgcaaggtaactctgaaagaacttatagtgctagaaaacagaaagaaacctcacaataatagtataataaggagacataagggccatgttttaaaaaacaactttcattggtcaaaaaataggtgagaaaaagacagatctcccatgttatgaactctttttatctcctttatactctgtcctcaaggaaatggaatactcagcttcttctgtctacaacacaagctatacagtgactccctctcaaagaattcagtatgaattttaaaaaggaaaagagacttcaagagcccatcccacgtgaagggatgctctctcggcctggacatatgggggagggcctaggccgggcccaggacgatgttgttgtggaatttggggagcccccgtggagggccctaccctccatggtgagtggaggggaaggggaaggggctagaggggattggaggaggggggaagaaggagaagggattaacatgtgaaattataattttgtaaaaattaaataaaaaaacagggagaaaataaagtttatttttactatttatatatgaaaatagtattttttgtttcacacttatatcatttgaattcattttttaccaacgtatttcattgctaaataggctatcactttgttagttctttcatgaaatgtcataaactgtattttaaaaaccagtcattagccaggcagtgatggcacatgcctttaatcccagcatgtgggaggcagagaccagcctggtctacagagcaagtgccaggacaggctacaaagctacacagagaaaccctatcttgacaaaccaaaagaaaaaaaaatcagtcattgctgaagagtaacacaatatgacattctttattgtattttcatcaattttgctgaattaatagtgaaatctcttaaacattttatatgcattgtagtcaaggtcttgtatgatttgagacatcttgaattcctgttaatctggcacttcatcatgacttacggaacataagttgtcaggatgtagggtttctcttttattttactaacactagaaataacacatctccaaattttaagttaaaaattcactgtacttcttcaagtgctctgtgcattgctgaagaaatgaatggcaaatctagacattgcagtacctatcacacaaagtttccatgtggacactgactgtaattgtatttaaggaaccaattaaactgatttaaagagagagagagagagagagagtgaaagagagagagagagattaacagtgggaaaatgtgagaaatattacctcagccaggtgattaaggttcacatcaactgtgttaccaaaattaaactcctactaatggaaaatccaaattatatttaacagcatgttaaatattgccagccctaaaagtgatgtgataaaaatagcactttatacttctgtagtctttgtctcaaaaacaaacctagcccactgatgagaaaaataacagataaaccctgaaagagacaaattacaaaaacttcttgaccaacccttatagctttcaaagtaatatgcatctctctgagttccaggcaagcccagtctacatagcaagttccaggtcagcaaagggtacacagacagaccctgtctcaaaataaataaattaggaagtctgggaaggtattacaaccaagagatatgatgtcatgtcctaggtagggttctggaataggaaaaagatattaagcaaaaccgaaagaaatatgattcatttattattacaaatgtctcatactgatatgacactaataggaagaactgtgtgtatggtacatgagaactgtgtataatatttttattatattttactataaacctaactaaaactggtatgtcctgagctacattaccattatggcctgaatatgaaataaccccaaaagacccatgtactaaatgcttataaccgtcacaaagtgctagcactactggggggtggggaggaggttgtctgtgaactttaagaagtagaacctagctggaggaagcaggtcacttaggatttatctctcaatgttacaccttgtctgttgcagaatatttgtttacactgtgtgaagatgtgtcactgtgattggtttaataaagagctagattgtcaggtaggctcagtgctaccagggtgcagaggtgcagaggggatggagtcagccaccagcacaatgtactaagcgagtgaggtggtaagagaaatgctgcagacacacagccaaaaaacaaacaaacaaaaaccaaaataaaaaacagaaaacaagttcaggctaagaaaacttctgaacaggtttcagtgtgcttgaaaatgtacttaggtgctgaaaaaagaaaaacaaataatgggtatagacagtcataaactaaataaatagtttaaaaataataaagtctttactgaatctacttttagactaaaatgcaactactagtctcaaacatctcatattggcacagattcttgtatattgattcaaatttaagattatttttgttatactataaggtttctactcgtttttttaaggtattgtacctatgcagctcattttaaaattttaagttctagtccttgagagctatttttacaaactgtttaggataatttaaaaatgcatgttagtagtcacctacaacaaaattgtagtcattacacattacataatgtgtgtcttgtttctctcatacaagatactttaactctaagtctctgaaactgatttgtgggaaagatttggaaaagtttggagacaccgactagagaagttttagaatgctgtaggctctacttaatgggcaattccacaggaagcttagaagaccagaaggaatgcctgctatgcagaccaggctcccatctctcatatacatgcccatgacctaagaattgtgcaaagctgaacattttaaaaatatctatttttattttatgtgtatgggtgttttgcctacatgtaagcacacaatgtgcatgcctagtgttcatgaagccagaagaaagagctagattccctggaaccagagttacacatgccataagctgccatatgggtactgagtacagacaccaggccctgaacaagaggactaagtgttctcaaccactgagccttttctccatcctctgtagaaagctgaatttccaggaagactgactagagtaaaaagtttgagaaattctgcaatttggtaagaaaagcctgcttaaagttggggctaaggaacaaactgtttctgaatagctagattagtgtcattaaaacgaagccaaatactttgataatagaaaagacgctttaaaggtaggttaggaattggtcatactttacccactgaagattcaatggatattaccatttaaatttccttgaaaaatcctcctctgggaaaagagttaactccaggataacctgcttataccaagatgggcccctgagaatttccctacattcatcaatccaagccactgcagctatgggcaaaggggactgactgctcaggctggtggcagagcttgacattgacattgtctatgtgattttacagagatataggatgtaaaagtgacggaagctgctagtaagatttcaacacaaggcctgggaagacagttagtatgtgccagaagcatgatttatacaggcaacccaagggaataatacataaagctgcaagggtaaaacctacactctggtgaagaatccagggcattgaagatgcaatcaatatagaacatgtgctgagaaagccacaattagtaaagtcaccagagagctgccatgtgggcttcaaatggcaaagtcacaggggtgaggctgcctaagaccatgcagctcacctgttgacatcacatgtcccagatgctagaaatgtaactatagaactcagtatttgcacctctgggttttagcactgctttagcctagccctttctttgtttcctgttcctcccactgcagtgggaatgattactctgcattaagtatactttttcctgacagagattcacagtaaagattccaccttcaatatcacagaagactttggattgaagactaatgaataatgctggaactgttaaaacaatggagaaagattagcaattatgatacggccttgaatatgagatgtctccatcacacttgtggctaaactcttggttcaaagcactccttagggaggttccaaaactttaggtgttggagaagatttgaaatcaggtctcatgggtgtgtgccttttaagttcatacagctcaatcatttcccatcttactctggtcccataagcaaagaaactcctttaccagaatttcccataatttcctatagccatgatgttctgtcaagatgcatggagccaagcaagcatggactgaacttccagaaactatgggttaaaataaatccttcctccttttaaattgtttgttaggcactgggccacagcaataaattgtaactaatgcgtatctttaaaaaaaatccactttaaaagtaacaacatgaaagaaatgtagagcattagtgtttggagtatgattgcccctctaaagctggtattagaattcagtcctcatcaaggtgggacatgaagaatgtagaaattcaatcaagtatggtatgtttgtggtataagctactcaggaataggctgaaacaaaaggattgatggagcccagaagttccaggacagtttgggcaacataacaagactatctctcataaataaacgtggatgcttaatttgtaagagcaagaccacatatacacattctctctctctctctctctctctctctctctctctctctctctctctctctctctctctctctctcctctctctgggggaggggtcaaatggggaccaccagcaagaaaggcatcaccagtgaagctcattaacattttactataaccataaaacaaagtaagtctccctatacatcacttgttctgccttagtatattattaacaaaggaaacaaactaggatagatgtctacaagatatgaaaagatagtgcagacaaaatggcaagttgggttttagtgctttaaatacaacagtagtaatacaacactagtagttcttttgaaatctccataaattaaataactcagttgtttgccaatgtaactaaaggcacctggaatagcaaatttacactgtgtgcttgctaagaagtatttgttgaaaagaatacaaggaagaaaggcgtacagaaggaagagaagaatggaaggaagacaatacatggcactacttttccctaataataaggtacagcaaagaatactactagtattgcaatattagcttcggaaatgactatcttattgtcagctcatgttttaaaacatttatttttttccagttgtcccaataaacagttttgttttgtttcatggtgattttgttcacctgcttcactatattatctagcacttccagagatgtcaattaacagcagctttggttagctttcttttttgtcctttctctatacccccataagctggtctcatgcagcccggaaagaccgtgaacctcctacaaagtgctgggactacaaatgtgcactaccatgctgacccattaagttgctttctgactggatgtatctagctttttctcatcactgaacatgatgccaagtgtggtttaacacatgcatctatttaaaattctacttaaaatcatgaacgtactcaagtttgcatttagatacagaaaatattttatactgggtacattttctttagtttactacaatactgaatttatactaaaacatttttgaataactaactatctccagtttctggcaaactatattttgtcaagatagtttctagcacatcatcaggatactacttgattctacttgataaatataaattgtgtttcaaatagtgtgagaataccaaattacttctggacatgttttagtaataaagtttctttctttatgctgtgggtcaattcatgtaacatcagaatcatatatatactccttaaatgtttaaaacaatctaccagtgcagctgcccatggcactacagctctttactaattttcttgactactatacttatggatgtttgcatttttcacagattctaaagtatttctaattatttaatttatttcaccaacaaatttttaatcttgaaaatgctaagtctaggtacccatttaacccaaaagaaaaatgagttataaggaccagaaaggatgaaacaactgtctttaatttattaacagaatttgaaaaactcttgaataccaaagtcaataaataagccaactgaatttctacgtgccagaaaataagtgaccatttaaatagcatcaaaaacataaagttataaaaaataagtcaaacattcattaaaagatgtcaaaaagattaatggaaagatctctgtccatgaatttaaaaactcataaacatgctcattctataagctagagaggcgatcaccaattaaaatttcagtaaggtactttgtagttttatataagctaattctaacaatttttattggaagtttgatagagagccaaaatggcaagaagttcttgaagaggtgttacatttgggaagtgggagaaagaagttatcaaaaatttctaggagtcgccatgttatcccaggaagaaaggacgctaaagccagcatccccaataagattaagtccttataaaatatatgggttagtaggtatggttgataattaagactgagctagcatataagaaaaaaaaattctgtaaagctacagtacttagaataggatgggcacagggacagacaaatagaccaattaaacaacataaaaatcttgacagcatactgagtgagtcatcagcacctcctttttttaatagaattttttaaaattctagaacatgtgtggtgatattttgtttatgatctaacaaataaagctagccacactagttagccacggaagccaggcagtagtggtatatacctttaattccagcacttgggagatagaggcagagggatctctgttagctcaatgccatcttgggctacacaaaattgatccaatctattctaaaagagaaacatagctcacacaaaggtgatgtcagcacttggggtgacatgcctttaatcccagcactaagaagataaagaaaggaatacggctgggcagagagaggaatgtaaggtgggagaagatagggtgcagtctgaatagcaggcaggcaggcaggcaggcaatcagtctgagtatgcattcactatgatgattcctggagacaggactgcccatttggtatgaggtggatgtaagagctaatggctggctgctttcaccctaatagctgactccaagtttttattattaagaacaatcagaatttgtacaacaaaaatgcacaccatggcatatacggattaaacagcattgttaaaaactgaagctagaatactgcccaggcatctaataaatacacactagacatattttacgatgttgataaagtagaaagcagtattataaaggaataaaatacaattacatacataataaacatcaatgtcaaagaaaagcagaacttcattatagagattcagctatacataaaaacaacatattgtttagacacacatatatataagtagtaaagaaaaaaaaaccttgcactaaagtcactgtaagtaattcccttgggagatgtgggaggcaaggcaagcaatacccttttcagaagtcctgtcatcattctacttcttcacctggtatgtttgttttattattttttgaatgtacatattcagttcacattttccattacaataatttttcttcctggtagtgctgaggatcaaacccattgtcccacatctgtaagaaaagcactcaccagctcagctatatcccgaaacccatggtaaattttttcaaagactacttctgacaaaatatcaacaattgctgcaatctttacttagtgaaaatcaatgattactactcattgcatcatgcagagaacagacatttgtattctcacaactaacaagtctgaagataacataccttatatagtccaaagccaggatcagtaagacaagtgcgagctgatgtagatggctgactggaagatccccctctggctgttttctttactttaggctgattattagaacagggtttagtctgaacatcattctgcttagatgtgctaggaagactggagtctggacgaactagcagctgaattatatcattcagtccaacgtcgtagtcaaataaagtatatccattctccaactagaaaaagaatagacaactaaactgaagtgcttacagcaacttacttttctgtttagtttgtctaaatatcctagataaactattaaaattgacaacactacaagtgaatgatcttgaaatggttcttaccatggcttctaatatcaatatcctctctagacccctctctagaccccaataaatcttaagaaccactccaaattaactacaggtaacactacatgccaactataacactattaaaataaaatctgtggtggagaggataacctaaaaaccctccccctaaaatgagtttgatgacttctctttatgccatcctagagccctcatctagtggctgatggaaacagagacagacatccacagatatacaatgagccgaaatcgggaatttagttgaagagagggaggaatgaagaacgaaggggtctgtactaggatggagaaacccacaggaactgttggcctgaacaagggagagcacatcgaccccagatgctgtccaggaggcctgtacaagactgatccagaccccagaacatggatgtcaataaggaggcctctgcactccagggagcctctggtagtggattagtatttttccctggtgcaagaagggactttgagagcccatcccatatgaagggttacactctggccctggacacatggggaagggcccaggatcagcataggaagacttggtggactttgctgagctcccgttgagggccctaccctgcctggggagtagtgggtggatggggttgggggggtgggctgggggtgggggagaaagtttgggggtgaggggagggagagggagaagggacttgaaataagcttgttccctaactagaactaataaaataaaaaaaataaaataaaataaaataaaatctgtattacagctgcttctaactcatgctatagcccacctaccccaaaaaaaagtcatgtaaatggaatggtaacttcaaactaataacactgtttccccaaaacagaagcctaggacatttccctagagctactagctatgagagagcacgttcctactgatgacaccttgaattattaactttacaactgagatactgttctactgctctgttacaagcagtctaggaaaccaactgtgatagtttgaaagtatttggtccccataatctcatagggagtggcactatcaggtgtgggtttgttggagtgggtatggccttggtagaggaagtgtgtcactatgggggcaggctttgaggcttctcatgcgtcaggataccgtttggtgtcagttgatttcctgttgcctgcaggatatagcagtttcactgcagcatcacctctgcctgcacactgccatgcttcctgtccccacaatgactgactgcacctctgaaacggcaagcgagccccttcaattcagtgttttctttagtgaccccatggtcatggtgtcttttcacagcaatggtaaccacaaactaagaaaccagtcttctattttgtttgtcaacacgtatattaacaatagctgactattcaactggtacaaaacacaagaaattaaactccttaaagatggaaatgaccatttcttcagaaatatcagtttaagcattgcattcaccattcttatgttcaatatccatcaccactcacggtgtaatacattaacatgatatttaagaattcaactacagagaaagggcagagaaaacatctgtcctttaattcactaatgtgagatttaggtgacagactcaagaccataaccaacacaattatacaggttacaagtattcatatttgttaaatagaacaaggaatcaatatttcacaacctttccagtagaaggattaaggaattaaactaggtatcacctcacagcttagttaacatatttaaccagaggggctcaaagtagctcaaagagtacaggcactactcttcctagggtcaatccccaacaagaacccctccccctcccctctctcagtaccaaaggcagtaagccttcgcataaatgggaatgttaatatatttaaattataaataccaagtctactacaaaagctttatctacaatggtgtactacctgcaaggtatatgctagggcaatgatggtacacagcttatgggagtaaccaaccagtatctgatttgactccatgagatagaacccatacccaacacaacttggttgagcaagaacctgagactagacagtccaaggacctagagtaaaaccaactaatagagaagaaaaaaatgtggtgataaaatgactcctaataatattctgctataaacatagaccaatgccttgttcagctatcatcaatgaagtttcctcctgcagaagagggaaatatagaaatccagagtcagacattatgatgagtgagacaccttgaatactcaggcctaaatgggatgtctccatcaaatccctcccctcagagctcagtgtgggatggaggacaccaagaaaacgaggtcctctaaatcaacatgatcaaagctcataggaagacacagagaccgaagcagcatgaacatggctcataccaggtccaagtcctctgaggatatattatggcttccagtttagtgtttttatggtattcctcagtgtatgaacaagcaaatctctgactcctgtgcctattcttggactcttttccttctggtggtctgtctcttctgactgtgatatggtaacttttatcttattctatttttttgcattttcaagagagagagggggggagggagggagggaggcagggaggggaggaggaaggagaggagggagggaggaggagggagggagggagggagggaggggagggagggagggagggagggaacaagccagtctagctatttagggcaaaggttaacaactaagctggaagacttacacctgatgggagagggaaaatcaagttttctccaaatcactccagcacaggcctcatgttcaggagtacctgaccaacatataatggactccagtttttttgtgtgcttttatttggttacattttggtgtatctttgttttacttgtagttttacttgtttccttggtcttgggggattttgttgttgtattgacagttttgtttgtttttttgagaaagaacttaaagctgggagggtagggaggggggtcaggatctggaaggacttgggggaggggaagaatattatgaaaatgtatcaaaactaacttgtttgaaataaagtgggggaggctttgagatggcttcgagagtaaaggtttggttgccaagcctgaggacctgagtttgagcctcaggatccacttggtgaactgactcctgcaactacttctctgacctccacatatgttacagacagcacatgcacacaaataaatacatgtaaaagtagttaaacaatgataaaaagaaggtactcttggggatggagagatggctcagaggttaagagcaccgactgctcttccaaaggtcctgagttcaattcccagcaaccacatggtggctcacaaccattccttatgagatctgttgccctcttctggtgtgcagatatacatggaagcagaatggtgtgtacataataaataaataagatcaaagaaagaaagaaagaaagaaagaaagaaagaaagaaagaactctttagtcctaaatcttccctaggaaggaggggaagcactcggaagaacaaaatgtggccttttcctcttccaggacggtgtttacaggcactcagaatggtccaagcgtttggcataccctcgtaggccttcctacaatatagcctctaaccaaactaggctgcctcaaacccctagcaacaggattgtttacctttagaccaagaaggttgggaaagcacctaattcacgtgtggtatgcactcaggtagacttccagggttttgtgcttcgagacccttataagattgggtccgtagggactacagtggttccatgtgtgccaagtgtgttcatgacaggaccaagcaggctttccttatcgaggagcagaaaattgttgtgaaagtattgacagcataagaacagtcagaaagtaaaataaatatgcagcttttttaaataagtcaaagcttggtcaaaaaaatgtgcatttataccttcattttgacattcttcaatagccaaaaataaaacaccttaattctgaaacagttaaaaatgtacaattttgtctaaacaatgtaatgaacaggacaattactttaaaattttaaaagtagagaatcaaaactctaaaagagcataaaccatccaaatgtattagtaatccattcccaaaaattaagacagacaatacattaaagaagtaacattaagataaatattgaggcacacataatccttccactctgtaggatgaggcagaaggatcccaagtttaaggccagcttgggcttcataatgagacctagcttcaaggggtggtggtggtggtaaacaattatgaattgaagatatttttattaatgtttgagacataagagtcagagagaccttaggagtgaatatgcctacaaaccttaactaccttctacccaagtaactgccaagaataactttaagttgctttcagtggtgctttctgaacttggtgtgacaggaacactaggcatatcaaggcaagaaactctaataagacagttgtctttcctcatgaacactaacacacacatacacacacacacacacacacacacacacacacacacactcattcctatgtcatagacaacattccaatccttttaaaagtcactatttttcactgcagttttattcagtaatgcttcacattctgttgtttttttaagaatgttggaataatttacctagactactgaaaagttcttctgtatttaacgtaaattcagatccaaagttatttgttactcaaattatgctctgaaagaaggagaaagggatgggatcacctagaacccagctccttaaattgttggttgtgagtccatatggggtcccataactgaatatggggagaagggaatatcacatacacaaaatgacaatagtaaatgtttttaaatgtgcaatgtccaaaatctaattcaaaataaaaaatgttatgtctaaaaatgagatgtctctggcaaaagtccatgctgcatagcagtgactccactgcagtcttggttctgaaaacacaatgtgcactttgtactgtgcatgccatagtgacagcaccaatggacactacctggaacaaccttacgcagattcagagcaggtagcaggtcatgaaatacaaggttttctgcttttgtaggaacataatggattaacttcagaaaagtgactttcaatattttcctgccatcattcctcagcaagtaccaaatttttatgctattatgttattttgtttaaaagtctgattttaaagactactcactgaaacattggtcagattcattttaaggtgttgaatgaatttatgattaagacagaatttctgacatcttctagaagcaccctaaacgtatttgtcattttgtaccacatttttacgaaaagcagcattctcatcattgattataaaatcaaaattatcaagtctgcaaaatgctgagatgttctatgtcctgaagtatcacatattcaatccacatttaattcttcatataaaaataagcatgcccacctagtaaacatgcaaattttcttgttttaacaaatgataagattatatagataccaaataatttcaaaattaactgatttattagcagcatatttgactggcatacctattttcaatagctatatacccagtgttgcataaaaatttcttgggccaaaaggagttccaagtagaaagttttacaagtcctgatctagaaactacaaacacctataggctcgaagtatataactatagtccatcaatgtcttacaaaagtaaacagttcggaactatcttttaagaaatgcaaggtgcaagattttcaattccgaagaaagagaaatggttaggactttgtcagatatactactgaatttttactgtgttaaagaagaaattccaggaaataggaaaggctgtaataacaatgcaagggaaaccaagggagatgggagttgaactggcagtggccaaaaaagcaatggaaagtaatttccacagcactgagcagtactagtggaggacactgcaactgttatttatcagtcatagactagagatacatacatatacacattcttcaaatagacaaatacttttatttctttatgtgaaaaaaatatggaggtgggtgtcaactgtttagtttttcttccagtatggttcatattccacatctacaatctatttaaggctatcccaatagagatgccaagagaacgcagggaaatggaattcttttagaagtctcaagagctttagattctaagatttaaagatcaaagcttggtgtttggtgtgtatgagtaggattcactcagcggacaagagcactaggttactcttccagggttgactcccagcacccacatagcggctcaaaactgtctctaatttcagttccatatctgacgtcctaatgtcctctttccagcctctgcagcaaccaggcattcacatggtgcaaagacaaatacttgtgcaaagcacccatcacattaaaagaaaaaaaaaggtggaatttcttgcactgcttttcaaacagagcacctggagaccctgtaaactacatagtatgcttcagtagaccattttgaggtgtccatgcaaaatgaatgctattggccctgagaatgcagaaagcccactttgaatagaaagaaacaagtaggaagctaacccttcagaaattcatttcaaagtctgatattcataaaaatttcctgtgaagttgggagttggtgccacacatctctcatcccaacactcagggcgaagaggcaggcagatctctgggacctctgagctaagggccagtctgatctacagagtaagttccatgacagccagggttacaaagaaaaaccttgcctggggagttgggttcctgtgaaatctggttaaattcaactacactccaaagattaaatccagcagaaataaaatattaggccacactaaaattggatatatggtaatttttttcagatcagggtctcactgtgttactatgccccttaaaatcctgagctccagtgatcttctgtatcagattttagaatagctgggaatacagtccccagcttatgtaaacattttatttataacatatataacacatgacaataaaatatcttgaggaaagacccgtcttttttttttttttcaagacagggtttctctgtggttttggaggctctcctggaactagctcttgtagaccaggctggtcttgaactcacagagatcctcttgcctctgcctcccgagtgctggaattaaaggcgtgcgccaccaacgccccgcaagatatctccttctattaaacataagctcagcttataggaaacaaatagccatgtggtaccaattatctgctaccagcacactttgctatctccatcaactggagaatataaaggacaaaactagccctggctagttgtcatctatacaaaagtaaatagtcaggagcaatgttttcctttttgatgtccaactctatggctagcacctacattctattttcatccttactggttcattattcagctggggagagggaagcagtgcgtgattaacagtgtgtgttggggggggggggttatctatcctcaaccaggaagcattttctgatgttgttaagttctggatttaaaccaatgtctacctttacattaagacatccagacaagctcactttagcattatttcactattacacttttcggctgttgctcactaatgtattctcatccttcatgtctatgccatgttgaagtcacccaaatatcctgggaatcagtgtacagtattattactacttggaaaattcaaacatgactacttagcttttgactggtaaccacaaggaaaagttatcagccactttcagcacagtaacacaatgctacatagtatttaatgcagatacaactgttaaaaaaaaagctttccagtaaactcttcactagtcaaacactaaagaatcaatataaaactggctacaacaggagcaggaagtactataggttttccacaggagaggctccccaaacaataaaacaaaggcctttcctttcccattgtataatctgttactttgaaattttagtctagtcttagaagttgtaaacctgtgaaggaaacaaaatattccttcaaaaccctttgtggcttataggctacttccaccaaatcagagaactgcttttatttcaaaccccaagacaggagccaaagtgtgatctatggactgcaagatgccaactttttagtggactaaagacaacacaaagacaaaggcaagaaaagcaagatgggtctgggtatctaatcatagactctgagactcacaggatgggaaatatcttatcctaatcaggcagggcgacatttaaaaatcaacggagatgccccttgtggcccaaaactactttctgtcttctgagttactgctagttatgcctgaagggctgagatttagaagcctgaacacaggaacattcgaaggtgagaggtgaagtctgactctgtcctcaacagatttaaacccgacttccggttaccaacatcgttccttaaacctaggtctctaggctcctacaaaaccaactcccagtctgagactggcaaccaagaggagggacccgggcattcagtgacctttctaatcttcagcgtgctcatatccttccagggaggaaacagagtcacggcgcctctctttgcatctcgcatctggcagcccggggcgggagtcagcgttgcggatgatgccaggcagcttgttcgttcgctcgctcgctcgctcgttcctcctggccctggcgcggctgccccgcgcccgctgcccttcctagctccgatcccccccagcgcgggaagctaagcattgtggccgctggccctctccatacaacaacagctagggctcggggccctgcgccgggggcctccagacccgctgggagaacctgtagttggggcccccgcagccgtaggcccgcgccccgcatcccgggctccgcaccccgcgcgcccggggccccgccagcggcccggcccgctacccagcctcggccgcggggcgcctcacctgcttgccccggtagaagaggcgctggcactcgggccgcacgtcgaacagcgcccacacccgctcgcgcagctcctcgatggtggctttgcgagagacgtcctcgatggtgcgcgtctgcgagccatcgatggtgcggacctggatccacatcgcggccgggggacacggctccggcccccttttgtctggccctgagctccggccgccgcgccgcccagcgccccgcccggcacggcacggcccccgccgccgcctcccccggagggctcgggttctccgccgcgggcggctcggcgaacgcgcgtgagggcgaggccgggcgctccagaccgcggcgaccgcccaccccctcctccgaggcggaaggaacccggaacccgcccggagcgcccgcccgctcgctcgcctgctcgcccgcccgcccgcgcagcctccgcctcgcaggcagggacggactgtggcgcggccgcgcggagtgtttacttatagagctccagcgcccacatggaggtcacggcgccaacccggatctcgcgagatccacgcgccccccccccccgcctcacgcacagccccggggcaccaatataggcaaggggcggggctttcggagccgttactcggggtgggggccgcgcggggtccggcacgccctgggcccggcgtcctcgcgtgcagcccgcccgccctccccggctgctggccgcgtgtgcacgcaccgcggtgtcaaacacacacgaaaaataaataccccggatgcgcacttgcacggccgagaaactgggggagagggttccggggtggggggaccgtcactcgaggatgtgggagcccgctaccgggacggcgcccgccacgcggcctgcgaaaggcgccgggctgcgtcggcttcgtgggttcgcttcccgcgcggccttcccgcggaaacccgcttccgggaggcccggctccacgcggccccgcgcaggctccaccgcggcgccccccgctccccacctcccgccggcggagcaggccctggaggtgaccgagtcggcctcctgcgctaaggccgcccttggccgcagggattctgggtttacagagctccgcacacctcccagccaaaaacccgaagctccggggcggtgggggggggggcacacgaccctccacacggggccaacgcagagtgaaaagcttttgagagaaagcaaaacaaacgtgtgtcctgcattcgccagtgccggctgcgcgcggatcgtccgtcagtccagtaccaagagcgcagatttgcagccaccaccaagatggcctgacggggaaaggccggaaacgtggcgtgtacatacacacttcgtgtgtctgccagcttgctggggaggaaaaaaaaatcatattcacctgcttcctaattaactaaaacatctagcagacgaagcgatagatatatctgatcttacccgagaagggacggaccgtttggtgccacaaggcttttgcaagcctcttgggcagttaaagtgtgcatgacgcactgtgtgactgagtttaatggcgtgctgcgggcatctgaagccagcgctgagtgttggggctcctggcttgagtgagacacacaagaattgcaatgcttttctgcttaaaatgtgatcttgagcaaattgcttggatttccccaggtaaaactgtgcatataaacacctagtgaatgttagcttcctgctaatcccttagtggtacacaatagggtattttggagcgtttgttatcaagagaatttagataaaccgggaatattcaaaggagacggggtgcttaagcaaagattggaagtgtgcctttcacacatcagaaaagactgcatatcagagaggttgactaaataaagaagggcagtgtgcgagcattagcattcaaaagcaggcttttgtaggcctcaggggggaacctaggctttttaaaggctgcattgaagtgtttaactctttaggatgacggtaggagtgtagaaggatgccttaggggaaaacgcaaactgtgggaaggtgagagaggctgaaatttagccaagaggcagctgttacccattttggaaaaaacttggagaccgtgagaatatgttcttgagtgttctaggaaactgagctcctgaaacttgaagaatttgtggatgtgaagaatgaagacaatggaatgttgacagcaattctcagagatgggttggataaatggtgttcttagctagaacaggaagcaagctgggagaattcctcgatttccccttgagttgtgctgcttttgaaatagattccaaatgtacctaagatgaagctgtctgagagttggaaatagctgtccaggagagtgaagggaagaagggaggtaaaggactagtcttttggttgtaatagtgtttgatggagacacattttggataatagagaaatcggtggtattgatatgagaatataaggggatattttgtttgttggtaatgttattataacctggggagtgactgtgacaggggtggggatatatgtaaaaatatattgaacactgactgtttatatgctgtattttatatatgtttacaatcacatttatataaagatccttcttagaaaaagtagggttttactttctatctattgatggtatatatgaaagtataaatcctgtcactgtttttagggctgatctgtacagaaataccacaaaagaagtttcctctgctctcttagtgattaatttggaagaaagcccaaatgtaagaattggatctagttaaagggttttgttgttgtttgtttttcattcttttttgcttatttgaaaatctcatgtacccctgactgagctcaaactcattgtgtagtgcttgggtcacatatagcttagaccactcaatttaaagtctgtgggttatgctgttgatactggtgaaagattagtggctttggaaaggtagtgtttatgcacccatgcttgtgtgtatagatatacacggatactcttcctcatgcacctgtcatttgcacaaatatattcatatgagtatgcataaatgtttgcatgcacacacatactaagtttgcccgtgtgtgtgtgtgtgtgtgtgtgtgtgtgtgtgtgtgtgtggtgtgcacatgtgtatgcatgttcaagtgtgtgtgtgtgtgtgtgtgtgtgtgtgtgttcagcaaaggttaacaaaggtttcacaaaaaggagtcaagctttgagtcacaaaactgaaggttatgctggggtttctgtgttctgatagtcttattcaccttcctatgatcataagattgggggacaaattagagcaagatttgagatagggtcttgtgtatccctggctggctttgaacttgctatgtatcttaagctggccccaaacctctgaccctcctgcgtgtacctgccatgctgggatttcaagcgtttatcaccacactcgattttatggagtgctgggaattgaactccaggtttcttgccaggtaggagagcactctaccaattgaactactttcctagctcaagacacaatttgttgtttctgtttttcaagacagggtttctctttgtagccctggctgtcctggaacactttgtagaccaggctgtcctcagactcagacacctatctgcccctgcctctcaagcgctggaattaaaagtatgtaccaccaccatcatgcatgacacaatctttgtacaatcttttttttccccagccaaaaatataagacacaatcttttaaaaatgtgttacatttagtgtgtgtgtatgtgtacctgcatggcacagcattcatgtgaaggtcaggtgacaacttgcagaagtcacttatgtccttccatgattggattctgggttgaaactcagcttatcacacgcttggtgccaagtgagtttacccactgagccatctttccagtcacaaaaggcagtttttttgttttttgggttttttttttgttttgttttttaataaagaagagggaggggctggagagatggctcagcagttaaagagcccaggctgatcttccagaggacctgggttcaattcccagcaactgatggcagctcacagctgtctgtaatccagctctaagtgatttgacaccctcacacagacatacatgccagcaaaaacaccaatgcacataaaataaaaataaatcaaaaaaaagaagagggtattgtacccaaaatacaaaccttgggggttgcagctgtgctgaattattcatggacccattggctagaaaggctgtggccagggactggggatgtagtttgatagtggagtgcttgcctatcatgagggctgggagtctatcaccaacaccactggggaataaaatgtggttgaaatggatacacatataatgccaacaaatatgctaaatgaattttaattgtcaaaaatacaaagtaaattcagagtgagtgtgatgctgcagagagcatacccttgtgagatgttgcacccccataatttcagctcagcgggtttctctattaaaatttgagcaaaaggttttcataggtctcaaggtgtagtctgtaagtaggctgagtagaacccccaccccacctctgtgctcgagtcaccaccacacacgctgttgcctttgaagcaggaagtcaacccaggccagtgctagaatgaagatgatacagaggaagcatggtcttctgttctcatttctgggggcaagcccagtcctcggacacagagatttacggtggaaactgaatacagactagttttcaagcagtcggctcagcccagaagagtgattaagccgatcacccacagctggatgatctctgttcttaatttttgtgtctttatcctactaaaatatactttcaatatttccgtctttttaaatgagtcaacagcaaactgttggttacataagacttcacaatatagtcacatccctttaaaattcttttcagagacagggtttctctgtgtagccttggctgtcctggaactctgtagacaggctgcccttaaactcaaagatctgcctgcctttgcctcccaagtgcggggatcaaaagtgtgcaccaccactgtctggcccacatccaaattcttttttttctattttattattatattttattttccaaaaaaaaacagtttttaaaattttatgtatatgactgttttgtcttccagaagagtgcctggtgccctcagagatcaaagagtgtcagctaccttggaactggagttcggatggttgtaagctattgtgttggtgctggggaccaaacctgagtcctaagggcagcaagtgcttttagccaccaaaccatatctctagcccctaattttatattttaaatttatttttctttgatattttcattgatagataccatgtatttgagcttaaacttctccatttcctcctctaactcctctgaaataccacccccagcacatccctctctgaatttttttatcatttttttatttttgtggtgtgtgtgtgtgtatggaggacagaggaaaactcagcagagttggttctctcctttcacatttgcgtgggttctggtgatccaagtctggtcttcagacctgcatccttcttgcaggttcaccagctgagccatctctaccagcccatccttttaatttctgggctctgtaatgaacacttagaacaaaagctaggaaacaagatcgaggcactcttgctcaatgtccagacatcaaaagcaagcaactgggaataaccagcatcaccctgggagcagatgcccctgcaccaaccaggaacatggaccaacaaacaagttgcaaggaggagataataagcctctgaggggccatgaaaacccaggctccaggcagttgctgatctccattgtccttcacacacattagcaacaaagggcccttctggtgaccatgccacctgcaaagatctcctgcctctggccttggtgactattgagagtctggaccctggttggccgggataaccacaatcgaggccatgagcatctagcctctgttgctctcaaggaatataaactccaaggagctggagcagccactcactgtccttccccagtgatgtggtggtttgttgtatgtgggcagacttctgagccaccctggcacctctgccttgcctgctctagtcaagggaactttcctctgaatattagtaacatcacttagatgctagatgttagactgttaggtttgtttaagctgttaactgtgccccccactttgttttttgttttttgttttttgttttttcttcccaagacaggttttctctgtgtagccctggctgtcctgggactccatctgtaaaccaggctggcctcagattcatagagatctgcctgcctctgccacctgaagattaggattaagggcatgtgctaccaacatccggttcccctccccacatttttttatttttgtatttatttatttatttatttatttatttatttattttaggttttcgagacagggtttctctacatagctttggagcctatcctcgcactcgctctgaagaccaggctgaccttcaactcacagagatctgcctgcctctgcctcccaagggctgggattaaaggcatgcgccaacaatgcctggctaataaaccattcttttaaaaaagacatccacctgtctgcctctctgtgccagattagttgtgttcaagagagcttcattcgaagaccttgccatcttctaacagagacagcagtcatactgaattaggacttcatcagaataacctatgtaaccttaattgtctaatcaaagcctctctctccatatagttataccagaatctaggttttcaaaacatgtatttcagtatgctagtgtgtaaattgagggcacaaataaatccacaacagatttccaagactcttccaggactgtctggtaatactctattttttatatgtatttattttgtatgtgtgttttaacacacatgaggaagaggacaattctccctcccacctggcattgcctctttctttccaacatgtggatctggagtgtcagactcaggtcatagagcttggtggcaagcaacctcacacactgagcaagctctgacaagggcatgctctctgccacatcacattcactgtctcggaatttgttttgtacttttgacaattaaaattcattcagcatatttgcggcattggataatctgtgtatcgatttcagccaactttattcccttagtggtgttggtgatagactccaagttcttatgatacgacagagctttattgtcaagctacatccctagcccctgggctacattccctttctaatctgtgctttttctcccaggaataaatcagactgtcaccctcaaggagtgtatttttgatgtagtaccccctttttaaaagatctgtggagttttgtgctgtgtgtgtgtgtgtgtgtgtgtgtgtgtgtgtgtgtgtgtgtgtgtctgtgtctgtgtctgtgtctgtctgcctgcctgcctgcctgcctgcctgcctgtctgtctgtctgtctgtctgtctgtccagaaagacaactcagtggataaagaggcttgccaccaactttacacaactgtaacagaggtaacattctcctcccatttgttctaatagccacacaaaacctagttcttatagcctcatacatgcacttagttccctgaattccagggtgtttgtggcaggaacttaagggtcctgctgagtcacctagatccagtgaatggataagtccagcggtactatcatccatggggcacacatgactaaagagatgggaagcaggagggaatgagcaggacattcttctctgtttccctgaccatgacttgaagacgtggcagttcaggcggccgcttctggagaggtctataacactgagcagctgtatgtcttatgcagcttaggggtctccttggtaatatctactccctttccccattccacttctttttcttcattcttgcttccttggcattatgccttccaccggcatacacattaccacagacgattggccactgttgggcggcagtagtggaggaaattgaagctaagaaaatgggttcaggaattagccctaaaaagcaaactttcaggatgggattttagttacctacttgattgaaggcaataggcagttcactgttgatggtgagccctttataaccccccgctgattagcctgtggttaattgggaaggagattcaaggcattaggagatcagtaagcaggaaataataaccataaagcttatgagatgggtggcagtttctgtaagtcatataaaaagaaaacagtgcacccaggacagctaactgcccgtttaaatactccctggacagtaagtctcaatagcagttaagtctcagggtagaagcggctgaaaatcatatccaaatcctaattatgaatataccacactgaagctaacatctagacggcgaggagggcagttagacctggggtaaggacagctgaatgcacaaaactaaggatgctgagctgagaatgtccttgaaggtttctgggctaatggattttctctgctccttctcatcaatggagagcggttctcccttgccttgagactgtgaacctcaactgaggcaggcacccagctggttgataattgtactactcaaaagctgcctccaccaaatttgacttgtttgtttgggttgtcttggttggttgggtttttgtttgtttgtttgtttggttggttggttttttccagacaaggtttctttgcatagctctggctgtcctgtaattctgtagatcaggctggcctcgaactcaagagatttgcctgcctctgtctcccaagtactgggattaaacatgtgtgccaccactgcctggctctaaatctgattctttccagactaataatcaggatcagcatagtacagcctgacagggaaggtgcagactccacttgagaaagaactagcttacctagaaaataaataacagaatctggcaattatgtgtgacaggaagcagaagcatgtgtgggagtgggttttgaagatgccagattgggagaagatcactgaaccggaaattggagagttcactggtagaggatagtctccatgactaaggaactcagtgttctaggatggagagcttctttacacacattggcttgttggctccttgacacttgcacatgacagtggcttagagtctgtgaaccaaaattaccagacagcttgacattacactgagcaaatgggacctggatcagagaagaagcatatcaaaatggcttccctgaaaatacattaccatgttcacttggaaggaacagagggacattactatccacaaggcaatagaaactattctagaattaggtacattagtttacttaggacctcagggatacctgttttctgcaagcaaggcttacagatgtggccatggaattgggctgcctactatcagcaggatggtagggttccagaatgacagaaaccagtgtcaggacttaattctgagaggcaaaataactgtaattattataacaggcatcgatgccagagtagcaattagaatgctttaatctacacagatttgtgactatttggggggaaaggcagatagaaaccctacaaggatactgcttgatttgtaagatgaaagaaaaggaagagctgaaactcagaaggctgacatcagtgttgcagtggggacaccacctagtttccagagacaaactgagtcacacaccaccagagtctactgatgaagtgagatacctttgagaagaatcttgacgatgcttcccaaggaaggactctgaacctttcctagatggactcttgaacatttgcaagaataactgcactagggactatcagcttgcactagggttattcccccagtctttgaatgtgtaaatggaaaagatcctgaactgtggattaagggcttaccactcccactgacaccctatatcctaaaggttctacagcttccccaaacagtgccacccatctagggacaaagtgttcaaacactcatgtctgtggagacagttcaaaccctcccttgagaaactgctgccagatttgagaatatacagttttgcatcttttcctctttttcagcttcaatgtcttttatccatcattctggactccttgatatggaatctccaatgaacaaacacaaagattgttttgtgttctgtttccttggaaaattcagtttagaaaatggtctgcacacccacagaagggaaaagatcttcaccaaccccacatctgacagagggctgattttcaaaatatacaaagaactcaagaaactagtcaccgaaacaccaaataatccaattaaaaagtggggtacagaactaaatagacaattctcaatagaggaatctgaaatggctgaaagacactgaagaaagtgctcaacagtcttagccatcaaggaaatgcaagtcaaaacaactttgagatactatcttgctcctgtcagaatggctagaatcaaaaataccaataacagtttattctggagaagatatggagaaaggggaacactcctccactgctaatgggagtgccaaatcatacagccactttggaaatcagtatggcgactcctcaagaaaatgggaatcagtctaccacaagatccagaagttccactcttaggcatatacccaaaagatgcacattcatacaacaagggcatctgttcaattatgttcatagcagcattatttgtattagccagaagctggaagcagcctagatgcccctcaactgaagaatggatagagaaaatgaggtacatttacacaatagagtaatactcagcagaaagaaaaaaaaaaacatggaatcttgaaattcgcaggcaaatggatagaactagaagaaaccatcctgagtgaggtaacccagtcacaaaaagacaagcatgaggcgttggtagaggttaagaattctctagtgtctggctgctttgcttctctgttcatccagcgttaaccactatatctgactccaggtttttattattaagaacaattagaatttgtgctccaatattttacaaatgggaatactaatttgtctcaaagggcattactggagattgaagacagtaatatatgtgaactccttgtcacacagcaaatttattgggcgttattgctgttctcaataatttttagatagctccaggacatattttatacaaaaaatggtacagaagtgttatatgagaaaacatgcttcacctcttgttgttttcatattgtagtcttttgcctttctctcccgccccccagaaaaacctacaggactgaggatgtatctcagtggtaaggggcttgccctgggccttgacagctagcatattaaagtaaaaaagcaaacttcagtgtagaaatatttccatgtgctaaagttgtgctaagggtcccaaaaggactagtgtagtatgttgtttgcctgcatggaaacagcggccagagctcgcatgacagtggcacccttttagaatcaactaggctttcagctgtgtgagtcgagctgtctttctttgtctcttccatgtgcataggcattaaagttgctaaaatggagtttataacctgagtttagataaaatgtgcctgtgttcaaagagaacaatcaacaaagtgaagaggtagtccacacagtgggagagaatctctgctagctgaacagcggattagtatccataatatatttaatgaacacaaaaaacaaatattcaagagaacacgtgacccaattaaaaatgggccatgaatctgaacagagttctcaaaagaagaagggggccagggagcatggcgcacacctttagtctcagcacgtgggaggcagaagcaggcagatttctgtgagttcaaggccagcctggtctacagagcgagttccaggacagccaaggctacacagagaaactctgtctttaaaaaaacaaaacaaaacaaaacaaaaaagaaagctaagagagatctcaaaaagtgttcaacattcttaaaaaattaaggaagtgcaaatgaaaactactctgaaatttcatctcaccccagttagaatgtctaagattctgacaacagatgatggtaaggatttggagaaaggagactcctcagtcactgctggtggaattgcaaactgggacagtcactttgaaaatcaatgtgacaaattttccaaaggcagagagggaggggggaaagaaggaagagagaggcatgaagttgggtgggttagggggataggtggggagaatctgggggaactggagaggggaaagaatatgtttaaaattatgtacaacttctttaaataaaaaaactaataaaacataaaaataaaaatatatctttgtttattttttccatttaaggtttattttactgttaattattatgtgtatctgtgtctgggtatgcatacctgagttcaggtctttggtgatgccagaaggtgtgcagttccagacagttgtggctacctgatttgggtactaggaaccaaactgctgtccactgcaagagcagcaagcactttcaactgacaagccatctttccagcctatttcattttgagatagggttttacactgtagctctctccggcttcctaatcataatgaacctcctgttttcctcctgagtgcaggaattacttgtatgagccactatgcctaactaaatcgtgcgggattttattagatacatttttctagtttctggggtcagaatgcccagataagctaacatcaaacttccttgttggcagatgtcgtacacctgtgatcttagcacttaggaggctgaggcaggagaatcatgagtttgaagacagcttagtctacatagaaagaacctgtcttgaaaaccaaaccaaaacaaaaataactcgaacttgtacgcttcaatttttaagttgttaagacaataaacattttattaattaaattccttcacttatcttacaccccaaccatagcttcccctctctcctctcattctatccccttacctcccctctgtcccccaccccaaaatccactcactctctgtttctgttcagaaaggggcagacctcccatgggtgtcaacaaagcatgacatatcaagttgaggactaagctcctggctttgtattaaggcttggtaagcagcccagtatgaggaataggttccccaaagcctgccaaacaccagggacaggtcctgttcccactgctaggagtcccacaagtagagcaagctataccactgtctcacatatgtagaggcctaggtcagttggttgtggatctctgcatctactttcatcagattctaggtgaagcctctctgatgacaattagggtagtcatgaatatgattacaggatcaggttagccagttcaggctacatatccactattgctaggagtcttggctggagtcatccttgtagatttgtgggagtttcctttgcaccaggtttatacctgaccctgaaatgcaccccaatcaagacatctctttcattactctccccttctattctaccccaaacccaatctctcatgttcccatccccacctgcccccagtttgcctaggagatttattctattttcccttcccagagaaatccatgtgtcccttttttggccctcctggttaccaagcctctctggaactgttgattgtagcatttactttataatccatatccacttatgagtgaatacatatcatgtttgtctttctaggtctgggttacctcactcaggatgattgttttcctaattccatccatttgctttcagatttcccgatgttgttttttaacagctgagtaatactccattgtgtaaatatttcacattttctttatccattctttggttgagggacatctaggttgttttcaggttctaattattaagaataatgctgctttgaatacaattgagcaagtgtccttgtagaagaaaccaaaataatgcaatggaaaaagcagagcatctgcaacacagggtgctcgtctaactggatgtcagcatgcagaagaatgcaaataaatccgtatctatcaccctgcacaaaactcaagtccaagtggatcaaagacctcaacataaatccagatacactgaacctgatagaaaagaaagtgtggaatagccttgaacacattagcacaggagacaccttcctgaatataacaccagtagcacagacactgagaacaacaacaatcaatacatgggacctcctgaaactgaaaagcttctgtaaggcaaaggacactgtcaataagacaaaataaggcagcctacagaatggacaaagatctacaccaacccctcatctgacagtctgatctccaaaataaataaagaactcaagaaactagacatcaaaaaaccaaataattcaatttaaaaatgggatacagatctacacagaggaattctcaacaaaagaatctcaaatgcccaacagacacttaaacaattgttcaacatccatagccatcaggaaatgcaaatcaaaatggctctacaattccattgaacacctgtcagaatggcaaaaaaaaaacaaaaaaaaacaaaacaaaacaaaaaaacccactaatgacagcctatgttggaaaggatgtggtgtaacaggaacactcctccactggtggtaagagtacaaattgtacagccactttggaagtcagcgtggcagtttctcagaagttggaaatcaatctacctcaagacaaagctataccaaaattgggcatatacccaaaggatactcaataataaacattttctttttttaacattttttcatttattttacatactgaccacggtttcctccttcttcccattccctccccatggctcccttctaccctcctcctctcttccccatccactccttctctgtctctattctgaaaggggcaggcctcccatgggcttgaacttaccatgggacatcaagttgaggtagcactgagatcctttccctgcatcaaggctgggcaaggtaatctagcatggggaacaggttcccaaaagccagctaaacaccaggtacagttactgatctcactgctaggggccttacaggcagactaagctacacaactgtcacacatacagagggactagttcagtcccatgcaggctccctaactgttggtccaggatccatgagttcctacatgctcaggtcagctgtctctgtcggttccgccatcatgacctcgacccccacaggctcgtacaatccctcctccctttcttcaggaggacccccagagctcactcagtccagtgcttggctctctgcatctgcttccatcagttactggatggagtatctctgatgacaattaggtcagtcacccaactgattaggcaccctctccactattgctatgagtcttagctgggttcatccttggtcacatctaggtcacatctcctagtaccatcatcatgacagttaggatttcaccaagtgatgggggagggcctggctgtttaggctactttctactctctaatctcatatttctgctaatacaggtgatacaaacccagaaaatggcaagccacggggaattctgttcaatattcttcagtcagtgcttctcagggttgagccaacaaagcaatgggtatcttccagcgtacatgtattccagaaattgttggaaattgcatcttaaaattatcaatttaaattcaataggcgtaagctaaactacaaaatccaaaagcctaaatgaatagatgtgattatgaaggtacacaaaacaaagaacagaggggacccaacacgtgtagtagaagcagatggtaaaaaaaaaatggaaatggagagcaacctttataaaccaaaaccatgttgtgaaggcattttatatggccctccctcccattgttacacctatgctgaaaccaatttaaaatccaaagcaaaatgaatatgctgtttctgtttcatagttatacattcttattatcttgcaaatgaattcatctgtctcttccagggtgttgcctcctcagcctgagagtgtcttcctcttaaatagttctcagtctacttctctggccactgctactttgcactgaagtgctccaaaccctccccgtttcttccagagtaagtaccactgcctgcagcaatgcaaaaggctacttactggtgattggtgcctgcttttttccatactcaacactcattattctgacttcaatgacttgcaggtatttcctggaatgtgtcctctggtgcattccttcatggctcaatatacaccgtatgaatagtaagtatacttgtgtctgtctggaaaacttctactctttgtaaggttttgtgctcctataaagtttgcttacttatcctgagatagagtctccctgtataattcaggctggcttcaagatcataatcccctgcctcagacccccaagtacactggccaccatggctgcctctatagtccttactgaccttcccagatagaatggcacacaactttcctgaggactttgtctgtgacacacagctctgttgaggcacctaccacagtataatcacagtggtgtgtgtttctgaagaatgtaggccacatacatccatacaacctctgtgccttcatgacccggcacagctcctaacacacaggaaggcgtgtgtacatttgaatacctaaaatgcctcaaacaaagattacttttgtttaaaagcaggaggttcctgtgtcggtttatattgttaataatctcgtggatccaagatttggtgtctactcaatgtgtgatattcttccgttaatgtaacgagaacttattgactatttactttaacttagacatggtaggataatgactgatcaacaaaatcagaaatgtgctttatcatagaattgataatttattgaagatgttcgggcacactgggacatgactgtaatacccttgctcagaagtctgaggcaggcaaatcaaaagtttgaagacagtcggggctattatatagtgagacccccatctcaaaaaactattgaaaaaagttctattgttcttatgagttattaaataaaagataatatattttagctttggccttcggtaccaacgagactgtccatgatacaagtctttctgatgtgtgggttgctgcctatcagcttacttttcactctttcttgttgatttgtcttttgttctccagtctagaacactatctcagttgataactacaataaaccaagaaagaaatgtgcaaaagacttgtacatcttattttaatccaagcaaaatgtggcctttgggactccatggagggctgggaatttatcaatggccttacagttttatcaagagtttctgcactgacagctttatctagtttcatgttaacaaatgagatgcaaaagaaacactcaagaaacagcaaaacaggatcagatgcttggacaggagggccaacttgtaggcattgatgggttattgaagtagactcaagcaaatagcagactgctgtgaaccaaggccacacaaactcctatttcagacagtgtggtgagaggaaagaaggaagctactggaacgagcgttttgaaaggagaaaacaagaaacaaaatccaaacataaacccaaaccaaaatatagttcctatgaaaatcagatattagaacgtttgaaaaaaaaaaactcaaaccaagttcctacaggttcctagagatctgctaccttggcagggttggtccttctttcttctgggctaaagttaaaaccaagggcaggtttagagtcaagtagaatagtgatacccattcaggtagttatgccagttcaaaggcataatagtcagcactacatggggctggtattattttcaaaatgtttaagatggaggtgagggagacttatctttcttaaatctggctatattgtgtccctcctgacccttagctgaaggtgattactaattagcaactgctgaagaataagatgcaatttgtggtggagacatgctgccacaagggttaaatgttgaaccccaactttaatatacaaaaaaagcaaagtacacacaatgtaaatttgcattttcactttgagtccaaaatagtaatcgcctgaatcaaagctaatttgatttgctgaattgaccactttgaaaaataaaaggttttataaaatgtatagttctaggacaaccatcagcagctaatattttctccacttttctgaggaacttaagatggacggttttcttgactgtattttaaaaacaaaaactatgaggccagggatgcagttaaggcgtagagaaattgcatagcatgtgtgaagtgtggggctgcatcaccagcagcacaagaaaataaaggttgtaggtcaagtgagtggtgcttgaaggaaatggaaaaaatatacaccaggtcattttacaccttttcccaatcccaaatacaggtctctctggccttctaataggctaatattacaaagagtctgggatctagatggtctgggactcctctggagtcattactctgtccgttaaacttaacctcagaaaagctaacagatgcatttcatctacaaactggtgtcaataacgactataaaacttggggcttctctctcacttaagagcagcaaatatcgtacacaaatgggtattcctgatatcaaaactggattgtgacctcacccagaattataatagctttaccattgttggttgattgcttggttttgtttggtttgtttgatggaagaggatttctgtactggtttggcagccaagcaaggccaaaaaaagccttactctggcttcaggacagaaagcagttcatctccgagccctggaacagtttcatagccactccttggaactgagtatggatcattgccactcactgatgaagaaaggccactgccaagctctctgacacctgcaactcttgacttgactgtctccatcagcccctctagagatctgaaggtggacgacttcttcacgtcttcaagcttcctgcagatggcagagcccaccgaggatagggcagatgaagtcttttgcttcatgcaggtgttggaggcctggacatcatgccagctcttggacagattctgcctcagtcccatcaaagccatgcatcctaacttcctcctgagttccccacactgcttctctttggctgccagcacactgcgtaatgttaggatctcttcctccaatttcgtgagctcagatttgagctccattagttcagcctcggtcaactctggttctgaagctgggtgggactcatatgtggatacagaggactgtgtcatggcatctggaacaggcagggaatcgtcttcatccagggagtccaggtccagctcttggtagagcgagtctagtccttggtttgtggagaagtaattggggctggtggagttgcagtctaggcctgcagggtcagaattctcgccagtgggataaaagtctaggtgagacaggtccatatcttgggtaacaaaactcattgcgctggctagtgagtctaggtccttgccagaggagtggatgctttgggtgaggatccacttccggttggtaggggttgggtgggtgaggaggtggaagctagaggtgggacttccggtccaaagggctgccagtcatccagcacctctctccattgcagactgctctgtggaggtgattcagtgggttgtttctgcatcacaaagaccttgtgaggtaggcagagcccagatcattattgagagaaatgccttttcctctagcagtagtgacataggccaggtgttcacaccaaattgtgtggtgccccttttctacacacgagtgatttttcaaaccctcaaagatcacttcgctgataaatttaagaggaagcccaggacataagtaaatacttaggatggggtgtggagctcaaaacttccatgcttgtccgcctccccatattcttcacccaggtttccaaaggagcccggagaaactgcgtgaactctcccgatagattcgaaagtaccacagaaatcagtagtgggtaatagaatcgcagtgaggtatcagcagtgtcggagggctgcaaagcagtgttcagagagtaagtctgggcagccgcgatggcttattctgagcgatgagtggaagggaaaattaaaccggtaatagtgatttttgtttgtttgctgggtttgggttttgctttattttggaattaggctctttgaaagcaaagactaaatttaaataccgatgttgtgtttttcttttccctacctgcatcttattcatatttctgaaagcatgtctgtctacatttaatggttgccagttgtgggagctggtctgctcagcaaaccagagccaatcagatggagtctgagagggcaacccactttttccctcaattcaccccgagtttgtaactcataagcagagggatcagaacactaatccagaaagggaatgtgtcaagtatcacttagctccttgtctggttgcctattcccaggaaatatccttgatcaagccttagacccagtgatcttgttgaatattctgctcatctttgcaagcatggcattgtggaacgtaatacatccctccagatactgaaggaattgttttgttttgttttgttgttgttgttgttgttgttgtttttccagacagggtttctctgtgtagctctgactgtcctggaactcaccatgtagaccaggctggactcaaatttacagagatccacctgcctctgccttaccagtgctgggattaaaggtgtgtgccactaccgtccagccaactaaaggagttttctgtacctgtgactgcatccaagccaactttagccctctcttgggtttatattcaataaccctttcacccaacctggtactgcttataattttttttaacctgggagggtgtgcttcccttgtttaaaaaggataatggttttattgaatgtatgaaagctggtgtgggatttgactgtgtgtaatgaagttctgaaaagtacagcattatgtgcctaaacaccgttttgtgactggatagacttttcctcctttgcctgtttaaactctagtggtttcaaaaatacttccagactctgacctctctctgctcatccaaaattgataaataaaggtttttaaaaaagcaaaaaggccctggattaagctagttaacatgaaccagacattggtcattcagaattgatatttcaaattaccaggtcagaatttccatctgaatttttcctccttggattgttttgaccactaaccttgctgtccattttcttgtgtttatgtttccccactctcaattaaaaacacaattctttgttagttttgattccatctgatgcagtaatgtttttttcctcataggaaaactgggttggcccatttcttttttctaaattaaattttattaaaactaaaaagatcttattttacataccaatcccagttccctttccctccagccctcccattccccccaccaaaccccactcccatcccccatacacgcctctgggagggtgaggcctcccatgggggggggtcatcaaagtctgtcacatcatttggggcaggacctaggccctcccccatgtatgtaggctgagagaatatctctccatagggaatgggctcccaaaacccattcatgcactagggataaatactggttccactgccagaagccctgcccaaaccctgcaactgacattcccctttaggggaccaggttcagtcttatgctggttccccagctgtcagtctggggtccatgagctcccatttgctcaggtcagagagttggtccatttgtaataattggtttccagaacccagatcaagacagggcatctcaaaggagggatcctagttggcaatgttctcatctcctgagcaaacctagataaataaatggaatagaggaacagtctattttgttaggcttatgtttaaccatatccaaaatatttatattttgagagagatctatgaaatgaaatttcatttagtttacagggcttctaatcagttgttttcaaagctatccttttaaggtgtaaaaatagcacacagtgaaacaaatctgtgtgatataaaaagacacaaaactcctcatcagaaatagcaagcaacaacagcaatcaattcaggaaactagtggcttttctagcctttatttataacaaagctgaagctgttaatgatctacatttagtaaattatttacctaataagagtgatgggtttatcaaagtccctccaaatgtaaacagtaaatgataatttaaataaaaatttctgctatgtctagaaacctattttattaataaaaattcttgaatataagtacaaaacaccccccctcagagatccattctatccagacatttgactaaaatttcttctttacatactgggaaaggatagcattatggaaaataagcctgacaaaagaatgtagataaagctggcctgtgagtcagaaaaggcttggttcatcacatggaggaagatataggttgcttcccctgtcaaagacaaactagcttggcatgtttctctacttatgacctagaaatgcagaaaatgctctagaagagatctggggctgggcacgattcagattgccactgggttctcatgaccctctccaacctacactctgcttgagctgcatgcctttccagcagaggcatagaccatgctgtatccgaaggagctagtggcatgtttctgtatgtctgactcattagtaaaaaggaaagtttatctacagactatgcagatcttgagtaccaggagactgggttctgtaagggcagggttcagagtagtggcaggtatcctctgaaatgactgggtaaagggtgtttatctgcctaaaaagagaactgagataccagaagggttaaccctgagtaaagaggactcccagaaatgacgaagaggagattcagagtgggggctgtgtgtgtgtgcatgcatgcgtgaacagtgtttatatgtgcctgtatgctaaattcctgaagctcagcattgaagggttagaatcagcaaattggggccaaataattctgacttccttgtatctaaggcttcaggtgcctgaagatacaaaggctattaatagaacttccaaaccctttaaaggctataacgcaaaatccccctccataccctggactgcactccctagcagcttagctattcttgtcttaaaactgtcgccttgctatggcaacggcataataattactttacttgctcaatcctggggcacaatcaattattaggcacatcttcattttagtaagaggtttttagaaggaaagcccaacagtattaagttgcacattgatttctaagatgaaatcctgatttgggggatgctaaaatgccccaaaatgggtattttaaaactggagaactgcagtagtgatcagtggctgcagacatcaacactgctgtctggttctactgcagctgaggccgggctgtcattcttcttcccatcctaagagagaagacagacggggaagtgctttctcttttcatctatgccataataataaaactaactgaagaagaataaaatatattgatatttatgcatgaaaatgccacaatgaaaccttttattttatatgccaacttaaaaaattaaaacaacaacaaatagaggcagctaatgtttactgactgtgccccaggaatttttaatgttttcactcctaaatattctttttttcttctttcctttcttttccttcctttcttcctttttttttctctgtgtagtcctggtagacctggaattcactctgtagaccaggctggccttgaactcagagatacacctgtctctgactcccaagtgctgggtttaaaggtgtgcaccaccactgcttggctcaatcctaaatattcttgagagtgagatataaaaatactattaggggcccaggagatggctccacaggtaaagtatttgctgaaccagtgtgaggacctaagttcgaaaccccagaatccatgtaaaatctaggctcagtgtttctgcagcaagatgagaagtggagacaggagaacgccctgaaacttgtgggctagctaatttggtatatgcagcaatgaatgacaaagaagacaccctgcctcaagtaaggtggaaggcaaagactgacatgcacaaatctatactcacctacatgaatgtgcacctgcacacaaacacatgcatacatcacaaatatacatatgtacatcatacatttttgtaaacatatacatcatacacttttaaagttttatttctgttgctgtggaaataccatgatcaaaagtaaccttgtgcaagaaaggatatatttggcacaaaattccaggtcacagtgtattattaaagcagaaacttgcagacaagccttcttgatgttccagacagctttatctctgaccaagaaattcactttataacagaagtacaacaggaagtctgaagggttctgcttgccggctggcaggcaggtttgtgctcagttagcattcacatacagcttagggtctggtacctagggcatggtgttgcccacagtaggctgagccctcttatatcaattaacagacaagacaatctcgcacagacgtgtccacaatctaatctcatctagacaatgcatcagttcagattctcttcccaaataattctagattatatcaaattgacagctaagactaaccaggtagtagacacacacgtgcacacacacacacacacacacacacacacacacacacacacacacacagtggtgggagcaagaaatgaatattatgtgggttaagaacctagatccctggctctggttttgaagtccagccttgcaaaacacaaaaagctattaacgtctgtgggatagtcttcccaattttataggtcatgaagtggcattacctagaggacaattgtcagatggtacacagttattatttgtgaactcaggatattaatctcctaagatagattgtttaaaaaaaaaaactcatattaaaaaaaaaagaaagtcttgctgggagttggtggtgcatgcctttaatcccagcactcgggagtcagaggcaggcagatctctgtgagtttgaggccagcctggtctcgagagcgagtgccaggataggctccaaagctacacagagaaaccctgtctcgaaaaaccaaaaaaaaaaaaaaaaaatctttatcttaaactttctgaaatgtaacacaattctttgcatgcccttcttgttctctttccttctctctagttaattaacaccaaaatttagattgccattccttttttctttatagcattttaccaactctgtatcaacaggaaatgtattatttagttgtgtctggctttgaaccttatacaaattgaatcatatctatgtattcctccctgacttgcccactgtttctaagatccattcgtgttgattttgttactgtagtttattcattttcactgatgtatggtatttgatgatgggcctcaatctgaatctgtttatgtattttataattgatggacatttactgagacactgggtgactcaaaggtcagcttctcccatgtgcctccccaaggttcaggtccatctaaagtgtattctcatgcatatactgagtgttttaaggcataagcaattctattcacaattagacttcccctttcctgaaatacatcctgatgctcatttaaggctccttctctagccccatttcctaccacttcccaggactcattctatactggacttctgggctacagctaattgcacttcttcaaactgtaagttccttcacactctcccgtttcaaagtctgtgcctgtgtcctttgcttgctctgcctgagagttcattgctctcctgcctcattcccacttcttaggtgtctcctgagtagtgaagcctttttctagtttggaattttccttgagcttccagaggtcctgctctcattatctcaggatctattcatttggctttcaaaaattgtcagatctcaggaagcagaactccatgaccctttccagcgcctggaaaggcatatcagttctgcttcgtgtagttgtaactgtgatgggcaggaactatggaaacaccacttagcattgtcagtgcctaacttctcaaactcccttggttaggatgaaagacccctgaaggctcaggcccccaggatctcggcccaggactgtggtgaccccaatcactaggtggaggcgaaagcttgatgcaaatagcaagaggctttattgcagttgtttaacaagctaaccccattagctccggcctttcatccacccaccatggtggatggctgggaaaagaccccgagaagccacgggacagagatcttatagggcagcgtggagtgtctaggggtatgcacaggctgaggattggtgtgcctccaggcttggaggacttgccctgtgttaattggtcaactggttgttatggcctataggccctcccacggtagttgttacactctgcacaccattgctgtgcacttgtccataaagcacacccagagcagtaaagcatagcaccaccagctaacttctgattggttccttgccacaaggcaggcatctgacctcctagtgaccaaggcaaggtcagtcaagcatgtgttaagctgttatggctgccaaaatggggagctgatccctttaagggcaagtgctgtgggatatttgttgtcttggcccagcatgtctcagccccaagccatggcagccatgagggtcggcctgaatgggggagcgtggacttggaaactcctagcaacccaatggtgataaagaccaagcacaggcatcttgtcatctttagagagctctcagttccctgtggcaaaactggagtctcttgtttattcagcatcttcctggctgtctcctaactatgcttccaaggccaggaggctatttttgtctccttcagctgactcctctctgttagatagctcctaactctctgtcctcacttgttactcacacacctagccctctccccaggtgcaggcctattcaaatgcttaggcccatagagatgtaaactaggaggcattctacactgatgccatggtattcaatagcagactagctcacattagcaatacaattgtaggccagagctcctgggtgctcctgtttactgaaaccagagactggactttaagacattccataatggaactttcttggtccccaacaatttgtactctgtgtgaatatatattgctgtgattggtataataaagagttgaatggccaatagctaggaaggaggtataggtgggatttctgggaagaaaaaggaagaggagggtgaatctaggtgctcaggagacaccaggagacattctggggaaataggagatgcaggatgaaagaaaggtaatgctctgtgatagaacatatattagcagaaatgtgttaacttgaattgtaagagctagcaaggaacaagctttcataattaataataagtctatatgttgttattttagagctggcagcccaaagaaaagtccacttacatatggcacccaaagtctgaccacatatatccacagaatatttgtgagctatgtgaagatgtctttctatgatttgtgaaataaaaagctgaatggccaatagctaggcaggagagataggtgggacttcctggcagagagaggaagaggagacatcactaagacatggaaggagctggacacacagaatggaagagatggaaaagccacatagtagaatgtggaattaaaaatatgtgttaatttaagctacaagagctactggaaaaaggcctaagctaaggcccagcttttataactaagaagtctcccagttgttatttaggggctggtgatccaaagatagtcagatgagaaagcttgctacaggcagggatacaatttacattcttgttgttaaaaagaagatgaatctttaattgaatttaagacccacttaacaagagagaaattatgtctagtaatggaaacccagttagcaacccaaagctggtgaagtcatggatcttggaaaagatactacaaccaccatttttctcaaccagcataatttctaactacattctaaatatttattcttctctatacaacaaatggaaaccattatagaaaaccacaaccaatcaaagtgcagagttgtggagcccagtcccaacgcatacttctacaatataccttctgctcctaagactcagggatcaatttggaagagggaggcagaaatattttaagaaccagagtaatgagaagtttgctgtgattttatatctcttagaaatgtcagaagaagctacaaccttgaagtcttcccaacatggctgcctaggacactgatagacacgctgaagggaaagggggcggggattcagaggcctcaatcctacatggagaactataggcaacttaagaattcgagcaagatagtcttatccagggaaaggcacatcaatcggttatcaaaaccaaataatcagccctgaacacatacatacaagtaacatacagacctagcaggttgtatttttatatttaggaatacacacacacatacacaccaccaccaccaccaccaccaccaccaccaccaccaccaccaccaccaccagttaaagaaatcgaggccttgaacaaatcttgggggaacacatgggaggtatgggagggaggaaaggaaggggaaatgatataattgtatgctaatctcaaaaaatgttttttaaaaggatatggataaatcacaggtttttgttttgttttgttttgtttttttaacttgttttcaggacaaggaaactccaggggactttctccaaaagtaggtaaattcaccctttttcataggagttggttttattccattagaaaggaaatctcccatttggtttcctctgcatttattttatgccagctgcttatctgctggacatctcactaagaatcacccgaagggttaagtggagatgggaagttggttgcattttatttatttgtttatttatctatttattgtttttttgagacaggtttctctgtggaatagccctggctgttttggaacttgctttgcagacaaggctggcctggaaccatcacagagatccttctgcctctgtttccctggtactgggatcaaagacatgaaccaccgtacctggcaaagttagttgcatttttttgatgagctcttcactttagagtagttaaggcttacaggagagctaaaagagtagagagagtttggcctctcactcagttgattttttatctaccatgtacagttgtcacagctaaagaaccattggtttcttgctattcactgagtgctgcagagatgttgtttaggccctcaagagtatttgtattctcaaatcccatccactgtactttactacattttctcttaattgcattcctggcttctgctagtgtgtggcaatttttcagacttctcttagttttgatgtccttgcagaattcatttcaggtattttatacagtgtctgtcaatttgaaactatctgatgctcccagttgcagacagcagtgctgcattttggagaaggtgatcagagaagtaggctagcattgtttgcactgggtttacttcaattgttgtcttggttcaaaagcctggcagtgaaggcacagagaagctagaaggccattcaaacagaagctcagaaatttattgcctgtgcaactttggaaagttattccatctctattctttggatttcatctataaagtagaaacagtaattcattaagttatccaatgtagaaaagtcacttagagtagtgcctgacaaatgggaaccttgatgtatgtgtgtgggcatatgcatgctgttgtaaatgttcctggatggcacgagagttacatgcttctattatgtacagctaccaggtctctttatctcagacaagtaagctatttatattgagtggtgaaaatttaaattgtaaacgttggcagtcaaagatcttcgtcttgctgtttctgggaatttttaatttacccctcaatagtttttcttaaaaattgtgtcatcaggactggagaaatggctcaggagttatgaatgtttgtgtcatgaggactaaaggttggattgttacccatgtaacaatccaggcatcctgcaaatatacacaactccaactctgagagatctgatgccctcttctggcctccatatattcacaggcacaggctccctccacaagtgtgtgtacactcacacaccacacacaccacacataccacacatgcaccacacacactctctctcacacacacgcgcacacacaccactcacaccacacacatacacacaccacacacactcacacacacacacaccacacacactctcacacacaccacactacacacacactcacacacacacacaccacaccgcacacacccacacactcacacacacacacaccacacacacactcacacacacacacacacacacacacacacacacgccacactatacacatactcacacacacaccacacaccacacacacacactcacacacacaccacaccacacacacacacacactacactcacaccacacacatacacacaccatacacacacacgtgcatacaccacatcacacacacacaccacacacataccacacacacaccacaccacacacacacaccacacacacacacaccacactacacacacacatcatatacctgtgggtgcttctgcagagactgttttgtgaattttcattgtcactttgtacagttcacatgttaacctgctttcatatacctatcaattacgcactcactttagcaccctggctctttcacccattgacccattgacgtgctttggactaataatctaggattgacttatgattgctttcttccctttggcccaagcaaaaggatcctcagcacttactggtattagaaacaaagacctaacatcgttcactgactgatcccggttggtgcagagacctgtacaaggaaggcaattacagttgccaactggtcagttttccaatgtgcttcccagctttccatctgtgactctaagtgaccacatgaaatgctggttcccagtgtgaaagcattccttagctgtttgggtttctgcaaattcccttagaaacttcacaaaaatgtttgtgcaattccaaatgtgcacttttttatttttaaaaaagacataagtcatccaggtattggtggtgcacgcctttaatcccagcactcaggagacagaggtaggcagatctctgtgagttcgaggccaccctggtctacagagtgagtgccaggataggctccaaagctacgagagaaaccctgtctcgaaaaaacaaaacaaaacaaaaaacaaaaaacaaaagaaagaaagaaagaaagaaagaaagaaagaaagaaagaaagaaagaaggaaaaagaaaaagaatatgaatgataaaagacatgtctcactgtctaaccaaggcaagccttgaactcactgtgtagtccacactggcttcagacttatggttatcctcctgccccagcctcccaaaccctagggttataggcatgaaccaccatgcttgaaaaatgtacattttaatatattttgggttaaatcttaacttattattttcttaaactctggattttacagtctgttttgtttgtatcttggtaaactgggcaagaggcaacaatggagacacttgtggagactcttatgaactccgggtgtactgtgtttgcaagttagtgcccgcagatgggcagtttatgcattgaaaggagaatttctgttttccttcagcagaaggaacttaaattgaacactcactgcaacccatggacacattaaaacctagcacatcccattcttaccacagccctcagaggacagaaagattgctgctctcatttctgcaggtaaagaggcagagacagaggcagggaggttaaacagctttctcacattcactaataagtggtaggactggaactcaaacccaaggcacatctgaggcattgaagtcaaggaacttgaagatatgtacacacccatattaccatccctggactccggaataccgtctgaggcccctttgcaatcataacctgccccacttatacctaactagcagcttttctggcttcatagcaacacacagcatttcccttgtgtcagcatgtgtggacttgtcaataaacactcttctgcagcttctttctaaaattttattacatttgtgtgtgtgcgtgtgcgtgtgcgcacctacaattgtgagacgcgattctcttcttaaccacgtggaacctgcagaattgaactcaggccatcaagcatggtggcaaagtgaccttacctgctgagcttcctcaccagcccagcttcttttatttgaaacaattgctacggggataattcttgctcttctggggcttttctgtccatttataaatagatgtgaggggtgtgtttcattcgtattactttctgctaagtataataggctttccttttggtgcggaggattgaacccaggagctcgggcatagcagacaagcgctctgttgctgagctacctccccagcctctcaaagctggcattcccttttggctttgaaagtaatattttcaaagcagaacattaggaaattagggaaaggcacacaaaggaattctgctacccagagataatcattaaaactcttgattataccctcccagcatgctttccctgtgtgcgtgtgtttgcttgctttggactatatggacacttcagttttataacctgttattttctctcagcagttcatatcaacattccccatgtcattaaatatgcattcttttatagtgatttaagactattttaaaatccttttgttttaaaattatccttttaaaaatgttagtggtggggaaatatgtaaaacagtcacaagacataaagcagtgtgacagaaaccctgtctttcccctcctgctccaggctccccaaagttccaggcctttcccttccagtgtccaactctgccgctatcctggacatatataaatagatacggggacagattgtttttctcttccttatgcacaaataaaagcatgctgaactaattttaccctgtgctttctttgcttaaggattctgagaggatgctttgtattagaatttaaagagctttcttgtttttaaaatgtagtattaaaggcttgcaccggtacagagtacagatacattggaggccatttttcatctgaacggcaaaaccaaaatggtgttctgctttgtcagtggcatcaatcacataacacagggaaggtacactgctcttatctctgcagagagaagttaggcagtgcttataaaattgtgcatgaattctgatcaataatctacttctaagaagctatttccctgtgtactgtccccacgtatgacatagtgtcaatgcatgggttttgttgttttcatttcctttagaaatattatattctatcataaatacgcaaggcttcttgactgtatacacacatttaggtatctttttgggatggtctgattatgtggcccaggctgcaatcttcctgtccccctaagtgttaggctaacagacatcttcaattttcctatcctccacctccccaagtgttgggatgacagacatgtgccccaaatatcaacactttattttaaaaagctagaaagtacaacacaaaattttctttttgattttggctccaagatgaccaaaaaaccaaggaaacagcattcataccaaaaggtgctgcttcggccatgtgcagtaaatttgtgcccccaaggacaaggccattaagaagttagtcatttggaacattgtagaagctgctgctgtcaggcacatatgtgaagcaagagtcttcgaagcctatgggcttcccaaactctgtcaagctgtattactgtgtaagctgtgctattcatagcaaggtagtcaggaatcaatgttgtgaagcccggaaagactgaacacccccaccatgatttagacctgctggtactgtactgcaacctccaccaaagcccatgtaaagagcccatgtaaagacagaaggaacaacaccttggagaaataaaatggaagttatactgaaatttttttctaacgtagacaacaaaatacataaaggaaggtgtgaacacagcccctgctaccacaaatcatgcagtcacaacacctgaatctggggaaactacagaggtaccagatctagagtacaatgcggggtgagcctcagagtgagaagactgcctttatgatcatagtatctccccttccagctaagcatgacacttcaatgttttagaggaaaaatgctggctaagagactttcagacttcgaaaacaatactttgaaatacttcacatggtctgaaagttaccagtgtaacattgtcaaagaagcaatgtttctgtactttatgaagaccattaggaagaaatatcatttaaaaaagtaaagtaggccgggcgttggtggcgcacaccgttagtcccagccctcaggaggcagaggcaagcagatctctgtgagttcaaggccagcctggtctacagagtgagttccaggacagattccaaaacaatacagggaaaccatgtcttgaaaaacaaaacaaaacaacaacaaaaaactaaggtaggtggctaatggctccgcagctaaaaacacttgctgccaagcctgaagacctgagtttgattcctgaaccctacataataggagatttgactccagcatattgtcctctgatccccacacacatgctgtggcacatgccacccttcaccaaataaatagaaaaaaatgtaatgttagcaataataataaagcaaagcagagtcgtgggtaagatcttttgctactcaagcatgaagaactgactttgaatttctagctcacacataaaaagccagacatagtgtgcaaccttgaagccccagtactgttggtgacaggacagtaagattttttgaggtttgctgctaccagactagctccagattcagtgagagagcctgtctgtaggaaatagagaagagaggcatagaactgccttcctctgctttctgcattcacacttaaggggttcacacctgggcatgagtgagtgtgtacaccacacacacacacacacacacacacacaaacacacacacacactatgaaaaatgctaggagctatatcgaaggctttttaaaaagttattaaataatctactctttttgccaaatcatagtctgcatctgcccttgtgtcttctgccttctcaatacatctttggcttaactgaaatgaaagttcccaaaacatgagtatttcaataactcgaagccattctatacacagttatgtacctaccagagctgagctgcccaggaaaagcagcagtcctttaatttctcctgtgatataagcaagatatgaatcaagagaaaacccaggctccccatgttcccattttgccacccaactgtgtcaggtggaggtcaagtaggtcccagccagtggagccctgagctagaggttcttgcatttttacaatgtgggggccaggaagagggtgttagtaggaaacacatgtcttctgagtcagagtggtgagaagggtcatcaggcaggcctccctgtaggaaactgggaaaggcctctgttgaaggagctcccccacccaaaagaaagaggtgcctgaatgaggatgcaaaagggcccagctggccagtgggacctgagtccttgatagagactcctgtctgagaacacagttcttgactgtgctccaaatgtggcgtgggagtgcagatttttttctcatgtattctgtaattgcttctggtcaggcctgagagatcacacacaggtttggggacagagatcaacttcctccctaagattaggaacaatttaaatgttcctcactagggagttgaccatggcaaacccgtacaatgttttacaacatagtagagaaacccaagtctgtggcagcttggtcgggagcctcgccggaaatagatgatttacttgaatgatggaagagagtgtgcaaatgtttgaggaatgaggtggctgtggggctagccacatggaggccattgctgcccctagatctgactgagtgcaggagagactggtgagaaaagctcctgaagggatgtgtggttcagtagacaaacataacttcttctgagccacagcccagcaaggtgcctggctgtaagtatcccaaggggacactccacaaagaagacatctgtctttgcctaatgctttttatctgcctcacccagctgagaccagagggccaggaaaccagtttgatgtggtctgtagaggagtaggatgtaaaaagtggagaaagaagagaaggttgaagttgcagaggcaaacaaactgtccaattctgcagtttttactgcatgttcaatttgctaaccactctgcatttagtgtgtttgcacattaccttttgctcactattaagtcccttaattaaatatttgcatgcctattctaatttccctaaggtgggtggagaagagtggctgatagacctccagaaagctaacactaactggctgtggattggcttgtcttcctgtgtctttgttcactctaagtataattattggtctttgtcattttaatagaaggaaattctgacctgttcttttaaccagcatgtctttaacttctagttttacacaaatatacaagaccaagttgcttttggcatatcacatcacatatgacactagaactcacctaatatctaacggtgaagcccacagctcacctactatttactgatgaagcccacagccagagctatgcattaatgttctagatcctcccttttattgtttgtttgtttttgtttgtttgtttgtttgtttgttttctgagacagggtttctctgtgttgctctggctgtcctggaactcactctttagaccaggctggcctcgaactcactgagatccatccacctgcctctgcctcctgagtgctggaactaaaggtgtgggccaccacacctgtacatcttcactttcaaatatgagcaggcaaacaaagacaatcagatatttgaggaaagctgtataaaaagaaaggttacaaaacacagacgaaaaataaacttgagggctggaaatgtgctgagtgaatagaggctgttgtcaccaagtctaagggcctgagtttgatcctttgtacccatatgttggaaggagccaattggttcctggaagcactgacttccacacatgtgcagtggcccaccccaaataaataaataaataaataaataataaaaatttaaagtaatttggagaagaaaatatggggctggtgtagggctggtgaggccatagctcacctgataagtatgcaagcatgaggacccgagtttgatacccggcacccacttaaaaagccgggaatgatggggcattcctgtagttccagtgttgaccaggcagagacaggtgatgcctggagcctcctgaccaccacgcttagccttcctggtgagccttaggtcccagtgaaagactctatctcaaaacaaacaaacaaacaaaaaagatgaaaaacaacatagatggctctccaggaatgatacccaaggttgacctctggcatccacaagcacacacacaacggcgcctacgtgtgcatcccacacacatgtgtgggggaccaaaatctttccgctatggaatattttgagatccggcctttggtttcactaaacatggagcaccagaagctccgacccactattgtattgttaatgccagtaaggctactactgtttaccatggcctcagggtaatatgcctcttatttgcatctgtatgtgccaaagcatctgaataggccctctcctgggcagacgtgcaataggtatgtgagtaacttgtgaggacagaaggtgaggaggaagaacgagtgcggagaggagagagggaacaaagagagggatgattccctcgtgatcatggcaggacggttaagaaacatcagaaaaaatggctaataaagaaatgactcgagttccacaacatggaactgagagctctctgaagatgacaagatgcctgtgtttgacctttatcgtcgttgggttgctgggagcctccaggtccacacacccccactcaggtcgaacctcatggctgttgtgggttaaagctgagacaagtcaggtcacgacacacatgcaaacctaggtacatgtatctaagccattccctcacaaaagacaattgtaatattgcatttttgtctgtgttaggatattgaatctttaaggcctatgccaaggagtggtatagtttaggatgtaatagaagatctgtctactctttgccttcttgagaattctcctcactgatatccatagtggctgcaccagattgaaaccaaaacaagagtgaatgagggttccttcttggcatccttgcaagcatgtgttgtcatttgtcttcttgatctagccattctgactagggtgagatgaaatctcaaagtacttttaatttgcattgccctaattgctaaggatagtaactctttttaaaaataatttatttttctcttgtgtacattggtggtttgcctgcatgcctatctgtgtgaggatgtcagattccctggaacaggagttacagacaattgtgagccgtcatgcgggtgccaggtattgaacccagtcagtcttctggaagagcagccagtgctcttgaccagtgaaccatctctccagcctggatagtagacactcttaaaggtatttcttcctttctttttttaaatggggtatttattaccagtttttgatttcttctcgtgagaactctgctcagatccataggcagtgtgtgctgtctcttcactccattgattgtttctttgctggagggaagcctttttgttttatgaagtcccatttgtcagttgttgaccctaattcctcagcaaatgtagtattgctcataaatctttttcctgcgcctgtatccggtagggtcctacctgtgttttcttctagcaatttcagcacttcagatttcaaactgaggtttctcattcatttggagttacattttgtgaagtgatagatacaggtctaaaatcatcctactacatattggtaaaacatgttatttattgaaggtgccatctttcctctagtgtgtgtttctggcatttttttttctgtcaaatatcagatacattcagatttggatctcttgtatttttccaactatctaatcattttgcgttttactgtatatttccatgtgaaccaaatatgctactctctgaggcctcaaggcttaaagttgtagcctttgtatttagacaatttcccaaatagacccctgcttcctttacattgacagtggtcatgtggttgtgtgttttgtttacgatctaacaagtaaaattggcctgaagatcagagtgtaaagctagccacactagttagctatagaggccaggcagtggtggtacacacctttaatcctagcagccatactagttagccatagaagctaggcagtgatggcacacactttcattcctagcacttggaacacagaggcagattggtctctgtgagttcaaggcctccctgggttaaatgaaattgatccagtctaaaagaaaaacagagctcacagaaaggtgatcccagcacttggagtgacatgcctttaatcctagcactaaggagatagagacaggaagggatatggctgggcagagagcggaatataaggcaggaggagacagaagctcattgcagcctagacagtctagacagtcaggctgagcagcatggttgatgcctgtgatatggggtatggatgtgatatgaatgccctgacattgtctgtgttggtgactctaagatggattctccaattaccagttagaaaaatgccactacttatcctagtgttcttctcatgtttaggttggacacacaaaggcacattcagagaacacacacagcaacacgtgcacacatgcgcacatacacacacgcacacacacaccacacacaccaatacactctacacatacacccccacacaccatacatacataccacacacactccacacatacagtcacacacacacaccacaccacacccaccaatacactccacacacacacacacacacacaccaccacacacacacacacacaccacacacacacacacatatacacacaccacacactacacaaccacacatacaccccacaccacacacacacacacaccaaccacacaccacacgtacatactacacacatacaccccacactttaccaaaacagaggtttgatgagaattcgtaaccctgacttagttgttgttccactcagacgtttcgctgtcaagaaaggagccatgacactggctctgtgattaatgtgctgagctcactcctttagatgcactaacctgacatggctgcatcatgtcaccaatgttcacaagcttagtgcagaaacgagattcttttaagaaatctagcctcagatgttagactgttaagcaatggtatgtccaccatggcctgattgtatagccaaacatttgctttagagatcccagcaggttttctcctaggtcagggggatctgttagtattggctagattgcttgcttggttgaaatattttgtaaggcacaaatgtcttttccctaaataaaccactagatggtagtgtgaactctcctgacagtggaccatttattgaatttagctaggatgaattcaagtttgtattctgtatttatacccgcgtcctgaaactttccaaactggtattcgtttgtggggaagctgacacttattcccatcctggaaaaattatgtgatatgttatgtgataattgcttttagcatggaaaaatctaagaaaatagttaaacacaattgtagtaactttatacttaacatcttgaaagaaatactctgcttactgcaaataacccaattttaaaaattaaaattcggcagagagttcacaaaggatgaagcacaaatggctgagaaacacttaaagaagttatcaaaatccttagtcaacaggaaatgcaaataaaaactactttgcgataccatcttataccagtcagaatgactaagatcaatacaacaagtgacagctcatgctggagaggatgtagggaaaggagaatacatgttctttctggtaggagtgcaaacttgtacagccactgtggaaatcagcatgtcggttccttgggaaactagaaatagatctacctcaagatccagctatgctactcttgggcctatacccaagggactctacatcctactacagagacacttgctcatccatgcctttttttttttgactgctttattaataataggcagaaattagaaacaattctatcaactgatgaatggataataaaaatgtgaaactcttacacaatggactattccaaaaattatgaaatctgtaggtaattagatggagttaggaagaatcatcccgagtgagattaaatcagacctaaaaagacaatgctgcatggtttctctcatatgtggatgttagctttcaatatgcatgctacattccatataacccccgaagttaggtatctagtaaggaactgggggaagggatcttctaaggaaagataagtagaatatattgttatgaaaagacaggctgggggctggaatgggaggattacatgaggaaagggaaagaggagatttggtggtttgaatgagaatgtctaccatatgtttgaatgcttggtcaccacttagtggaacttttggggaagaattaactgggggtgggctttgaggtttcaaaagcccaagccaggttcaatctctctccctgatgcctccagtgccatgcctgtctgtttcctcctgtgatgatcacggactaacccaaaaaattgtaagcaagctcccacttcccaaaggaagtgctttcctttataagagttgccttggttatggtgtctcctaacagcaataaaacaataactaaagattggggggaataaaggagagactatagagagggacaactaacacaagggattatttgaggaccatgtggaaacctactactactactgtagaagcttcttaaaataaatacacacatatatggaagacatctaagtggggccaccaaacaatggtggagacaatgcttcaactagacatcttatcttcattttaccaagtgaaacctccacttccaggaatagctgcatctagttgaattttacaccaaaaaaagggcatcaaggaaacccccacgcatctcaggcatttgccaagactattggtggtgctctacaaactgatggtaatgtcctattgctgaagacaacacttacatatctcatagaagacagagaagtcgagctggtacctaactaggggttttacccctagtgactattgttcactgttctgtaaggtactctgcacatgattagaggagaaaggtaaccattaacccagcttcaaactctgagatgtacaatggtgacatgcctgcaagatgtgatgctggcgggatagtggcacactgtgggagtaaccagctactctctgattggatttaagacccacaccatgaggtgaaactcatccatgacagtgattaagtgactaagaatgagactggatacgtcaaggacctaggggaaaaccaaatactctttttccactgaaggaacatagcaacaggatgactcctaacgatattctgttatacccttagatcagtgcctcactcagccattatcagagaagctccttcttgtggtaggaaactaacacagagacccacaggagggtaattcacagacagagattttggaatactctgtcctaaatgggatgttttcatcaagccctcacctcaggctcagggaacactgctgaagaggaggcaaaaagattttaagagccagagaggatgaatgacaccagggaaatagtgttctctcaacacaacaggactgatacacaaatgaattcacagagactgtggcagcatgtacaaagtctgcacaggttcaagccatatggggtcccagtactgagtggggcaagtggacaatgggctaaccaagaagctatttgcaactgatgcccactttcaaaggaaaaaatagtttctacaatggaatctcactgagtatattaaccacatttcagggtaagcctattcccagaagtagatagttaacacaaaatgaactctggtacacacaaaaaagataaaagactcagagacagatatcggggtgcaagtttcaagctgaagatcagaaaagcaaagcagccaaattttgagctcttacctctacctcaggctgaaaggactgatcctgtctccaccaagcctcatactgctgcttctcctaagcataactggagaatcaatcatcaatctccacatgagacctttgctttatttatttatttatttttttaaggtttttttcgagacagggtttctctgtggctttggaggctgtcctggaactagctcttgtagaccaggctggcctcgaactcacagagatccgcctgcctctgccttcgaagtgctgggattaaaggcgtgcaccaccaccacccggccagaccctttgctttttataactcactagcgatgggattaaaagtgtgtgatcccaagtacttgatcatctttgtgggatctgtttctctttagaactggatcaattttgtgtagctcagtgtgtccttgggccaacagacccacctaactctatctcccaagtggtgggattaaaggtgtgtgcaaccaccagctggcttctatagctaactagtgtggcttgctttgctttctgtactcagtcaagctttaataaatcataaataatatatcaccacaatttcccttttttgtctaatacaaaaaggctataactaacataagaaaaactatagatagtaagtacaaagtacaataagatatatacaggcatcaagttcatcaacaaagtctagtccatttgcatttgacaaatttcagagaaaatatctagtccatttgcatttgacaaattcagagagaatactccattatctattctgtcttggtgagtccaaattcttcttgttgttgttgttttgtttgttttttcaagacaaggttttccatattgctttggaggctgtcctggaactagctcttgtagaccaggctggtcttgaacttacagagatccgcctgcctctgccttccgagtgctgggactaaaggcatgtgccaccaatgcccggctcactttacatatctttagcgagtttcttgccgtagtctggtaaacaagaaaaactataactatctagtcttcaatttcctcagagacctgagaaggaaataatattaactgagtaaacaggaagtgtgagcaagtaacttccaaaaaaatgtgagaaatgacagaaacagctgacagtcactcaatatttggcctatatgcctagcaattctaacagacatttctctgaagcaggatattctaaaggactgtcccaccccatcttggcaaggttggcagtcactctttttgaagtcctatttgttcaatttgtacagcctacagtcagcagttgaggcaagggcactttcttgctcagtgacttacttttgccacaaagaaagtaaattccaattggagtttctttgatgcccaccatcttctctgaagtagattggtgctgtcaggatcagacatgtctaattgtcataaaaaagaacctatgttattgaagcatcttaaatgccatattttgtagatttctgaagtgtttggagatgacctgtctatttaaaatatatttgtttgactttgaaaacatacctaatgtgactacaagttcgattgtaataggtgactaattactaacctgtatttccttattatcctatatagttggttatagtaacttacaaagactagaaatttgcattaccttcataaatgagctgtataggtacaatactttgaacaagattagaaatgtatgtatagtatgttttaacaaattaattcaaatttgtatcaatatacaatatttgtatacaatatataaaagtccagtccaatgtaaattatttaaaactagtagttgctttttaaaattagattcaataatctacctttttatcttatcatatctatattgtcccccttttcttttcagagtagattcaatagtctacccttttatcctatcatgtctgtattccttttcttaaaaaaataaaacttgaatctaatcccctttgtccaactttcttcctggccataaccaacaatattttgtaaccaatcgcctgaacaatgacaaatatccataacccagtgagtgaccaaaaaccatccaccccgcttcttgagaatgtgggtgtcatgttcttaaagttacttcctgctgtctgggggactgtggcatctttaggggatcctgaaaagaaaaatttgcattaactgtcaagctgtattattttttttccagtctctgcataatgggcaagtgccacactgaggagaggcagcagtccgaggcttggaggaaagcttatggagacaggagtaatatggctggaatataaagaggaggagacaggaactcagagcttttgcctctagggattcttggagataggatagccctgtcagcctgcggtacaggtaggagctagtgtcttgactgctttgcttctctgatcttcagcttgaagcttgaaccccaatatctgactctaggtcatttattttttgtgctacagaactcaaaggtatttttgtcaactttttgtctcatattgctttgtttggggattttttgtcttattattctcctacttatatattatggtttccattttgtgggggagtaaatttctgattatttttgtttgttattttttaaagaaaccaaggcatggagttgggtggctagtgaggagaaaagtgtgatcagaatatattatatgaaaaattttaattaatattttttaaagaataagaaagaaacgttctgctttttatgatttttttcttagctacattaagggtagaagcatgagttatgcatgttctagtgatctctctctctcttccttctctttctttctctatttctatctcttttcctcattgtctcttcctctcttctattcccccttcctttctcctccacatactgctcactctttttctttggagagtcatgatacatacagctaataaggggatggttacaatagcttactttaaaacgaccaatttagcatacaaaaaagaaacggagttaaagcaaatggaaagagaactagaaaccacttaccactactgcggtctcccaccacagttgggcttctctgaggccttgtgaaaggaggtgcccatctgtgacctgcactgctgtgtctctaatgctgcccacaagctttgccacatcataggcacttgataataggtttggttgaatcaatgagtggttttgaagtcttacaaacagatgggtagatgagcgtatgctcagcaaaatccaaggtccacacacaagttctacatcccagctttaaaaagttcaatcgaaagataaaactgtggacagaactgtcacagcacaagaaagctaatgagatcattaacctgttaaacctctccttaatcatcaaagaaatacactttattaaaacaggaacagagtgacccccaatcaatgagactgtcaaaaagttgctattctaacaataaagtgtgggtaagaacatggagccaaaaaagagaatgtatacattatgcataggagtgtgaactggtgtgaccactttagaaaacaatatagcataaaaatgtcttctaatcaggattcaaataccagatagaagcaacctaaagggaaaaggcttaattttggctcacagttcaaagggatatatagttcatcatgacaagatgatagagaagtggcccagggctgagacagtgaaaacatgaaacgactggttacatggtagtggccaggaagcagaatgttcagtacaaatgtgaacctatctttatgctcctgaagctaagtcctgacatccaaaatgctctacagcctccaaaacaacaccaaatggggaccaagtattcagatctagaagcccatggaagacatttttgtccaaaccatgacatactccttgagaaacccttgcacttatgtagcgggaaacatgagaaaagtatgggaatgttcagagcagtgaggtttatgatggaaagaaacagaaacttgatcaatacctatcgatagatataagtctcactattgatgagcaaagaagaaagatggcatggcgataccagctcctgtatagtccccaaacaatgtcttttatactgtccaaccagaaaatgcagaataaatgatctcctaagtccaagcaatgtcgtttagcatctcctttctttttccctccactttcaaaaatgatttgtaagccagatgtggcagctttaatccttgctttaagtccctggagaggtagatgaaagctatgagttctaggccaacctggtctacctagagagggtgatatagtgcggccctgtctacaaacaaacaaaccaaactaaacaaaaaaacttactgtgggaagtatggctgtaaaaaagaaacaatttgccaagtggaaaccctgactttagaaagtctagagtgtgagtatacaagaaaatacatttaaaaacaatttcatgaccaactttgaaataagtttgttagcctctgacttgcacactgactttgtcttcattttgaaaccacttacaccctaacaaaatgagccagaaaaaccatggggagggtgtggtcagttccttttgcaatagtaatgacctaatgcctgagagaactgccctttcctcatagttgaggacatttcagccactgatgaaaacagcaagttgctgtaggacgtgtcccctcctgttcagccagtacaaatggctctctcattgaaggcaccagtgccaaggaggctgtttactctgctaagcccagttatgagaataccaaatgtgccctcataaaaagcaacatcagtgttaaggattgaattccatctctcagaaacagaaggatgaggaggaagaaaaaaaagccctcttgggaaacaggagactgagttaatatggtaggggaaaaaaacttgttgaattcttagattatcttattatgtaaaacaataggctccaagcaaagagtggaaagattagagggatcagacacatttgacttctggtgctggttattgctaactagtcaaactctggtgctgagtagtttcgagaaagctgcttaaaatgttagaccttggctcctttatttttagactagacaaaatagaaaagccaccttgaagcgttatgagaatttagtaatgcccacctcattcctagcctactccatggaagggacacaatgaccttaagaggggggttctgcttctgagttgagtgacccattttatttaccaaaagttgctttagaagtctcttaaagggtctttttactgctaagttcatgttctgtttttaaaccacaagctcatgatggctatctggaagacacaatgacaatgtatatctgccattaaaaatggattaggtagcagccaaccaacaatggtgcagattttatctctgcgagtgacacttgcaagctccagaatcctacatagaagaacttgtttgacatctgcacatggctaacttatctcatccaaattgaaactcttccatcaatgagtcggttctatctccatctcagtaaactatgtttttgtatatccagatgcctaacccaggaatcttagattcatctccaagtcacttcatcccttttaaaaagtaatactttcaaatctaacaatgtattttaatcatatactctcctcccccaactccttctagacccatccttacccctatccacccaatttctaattttcttcttcttcttcttcttcttcttcttcttcttcttcttcttcttcttcttcttcttcttcttcttcttcttcttctttaaaacaacttttgagtcctgtttgtattacctaactactcttgggagtgggacatgccttagaatgtggtcatcctatcatggatcatttaagaaaactgactctcctgatcccagcaactatcaaaggccaatagttggtggtggggtctcatgcctaccccaacctcttccatgatagcattttgtgtggcttgatctaaagtaggtcttgtgtatgctgtcacagttgctgagtttatatgtgcaactgccctgctgtgtccagaaaatagtttccttgagttatctatcacctctggctactgcaatctttccaccctcttttccttgaagatcctggagcttgagtggaggggattgatacgtaaatcccatttagggttaaacattgcagcgttcttattgtctgcatgatgaccagttgagggtcttagtctcagtattaattactctctactacaatcagaaagtttcctaaactcgtccctttaaaaaattgttcccccccccatcccaccctctatttactcctcagagggaataaggcttcccttggagagtcatcaaagtctgggataccaagcttaggcaggacaaaatccctccccccagaatcaggctgagcaaggtgtcccaccataggttagaaagtcaataatacataaaccagtccttgctaaagatattcaataatggagataactttatttccaggtgaatttctcacctggtctttgctttctctttatttgttctgtgtgtcacttaatgagtctgctctcctgagagtcctctgtaagcccttcctcccctcccttgtctatgccatggcttccagagtcgctttttttgttgttgttttgttttttgtttttcgagacagggtttctctgtgtagctttggagcctatcctggcactcgctctggagaccaggctggcctcaaactcatagagatctgcctgcctctgcctcctgagtgctgggattaaaggcatgtgccaccaatgcccggcccagagtcacttctattccactcttcaatggtgctcgtctcatcgcccttttcttagcattcccaggacctctttgatggcctctctacatcatgataaagcttctctccccttctccttgcaggttctctcttctctgggccatgttgatggcttccaatagttgatagctttcataggaagaatggctccatttgttattcttcccagaactctcatagttttagagtcctggacttggggcaattgagatgtattttagtggaagaacacttccctattatgttcaaggccttgagttgagccctccatactaagaaggaggaagggaagaagggagagagtgaagggggaatggagggagggaagaattttctttggctctattccttacgtcgtgtgtgtgtgtgtgtgtgtgtgtgtgtgtgtgtgtgtgtgtgtgtgtgtgtgtgtggtgtaatctttcttgggcatcctgaagtttctggagagagagagagagagagagagagagagagagagagagagagagagggaagagaaggtttttatgagttttgtatgtttaattctgcttttctgaaaacctttctttttaatatatttactctcctctcctctcctctcctctcctctcctctcctctcctctcctctcctctcctctcctctcctctcctcttccatcttctcctttttccttttcaagtctaccaagtctcatgagagttttgcttttgtctggttgttggtaacattaagaattcagttaggctggttgtcttcaccctgagttgcagggttctcctgtaatgagactttcatactcatttctctccactacaccttagttcagtacaaagccattggttctcgtcgcccctgtgttaacatgactacatctaggacaggaatgtgttgcacattttgaacttgaacaattaattaagtgccaatctcagatatccatgttacctttggcatgttctgggggaagctcctttctaacttgtttccttaggatttatttctctttgtttatgttttaattcccaatggggcatcacacaggaaatttaggccattctttacttattcgtgataatcataagatgattcttgttcatcaaactacagttgtatgacttctttttacttttttcatcatacggtattttccattctgaatctacacctttctgactctgctttttgggggaagatgaaagtccttttcatacatgagactgatgatggggtttcccagcctggggtctaagctggagagggcagtggctaggtctgtgcgcatcaccaccaagtcctgctgcccttcagaaccacccatccatcgcttcttaatgtggtgtgctacttgggaatttccaagaatttggaacatacttccccagaactgtgaataatggccaaccatctcccatctctgttcatgtattctgaaatgaaatcatgcttttaaaatttttcataatataaaaattttgtctcggcattccaaagcacactggttttcagaagggtgtttacagttaaagggaactttgaatctgtcatccagtcttattttaaaacctggagtaagacaaatgggataaaagtacaagtgaaattagagggcttcaatagcagaagcgtagtggaagagttcttcctaatttaaccttgataaaaattcaacaaattgctgcaaacatgatttttagacatagagcaaaggataaccagtctacaatccacactgccagaggagctaggaaacaaggaggaccccaagagaagattgcatagtccctcaaagaaggggagggggacaagaacccctgaacaaagtgggagcatggcatgtgggtggagaggaaggacataggaagggaagaagaggatgggggaggagaacaagaggactgagacaggggaggaatagaggagggcaagaaaggagatgccttgatagagggagacagtacaggtttggagaggggtctgacacaggggaaatgttaggggatccacgggaatgaccccaactaagaatccaagaagtggtggagaaaatgccattggtacccttcccctacaatgagattgatgtctaccttggttaccattcctagggccttcatccagtagctgttagaactagaaacaggcacccacaggtaagcgctgaaccatacccctggaattcagttgtggagaggaaagaggaatgagcaaaggagccaagacagggctggagagacctgcagaaacagttgacctgacctagtgagagcacagagaccctagtcataaagctgcagaaacagcattggaccaaaccaagccctctgaatgtgggtgccagctaggaggccaagacagtcgatgggacctctaacagtggagccagtctttaaccctagagcacaaatggactttgggagcccactccctatggagggatactattgcagcccagatacagcaaggagggcctaagccctcccccaaacaatatgacagactttgaaggttcctggtggagggcctcactctccctggggaggagttgggggatgggttggaggggttggtgggaaactcgggaggatgtgagggtaaggggatgagggatggatatgtaaatatgagttgtagtaaagaattaaaaaaaaaaaagaagccacaaagttgaagcaagctgcatagggttggccatatttcctaagtcctgatggacggagcctgttgatctcaacctgtggccactgccactgagtgcagagagcagcctctctgcaatgctttccaggaccctgtctacacttaacaccaacacccacaaatgaggctccaccttgtacacacctttgaagtgggagctggggatggtgaggacagccacatctgattttccaactacatttcttgctgctagagatctatatagagcttatttgtgagatttactatcagttctgtaccattaatggtgtaatcttgtggaaatgatttccactctgtaagaatcacttcataatccaagatttttccattggcttcagaaagaggtaattcctataataaaaatgttaccaaaaattaaaaaaaaagatacgcttctgtcttttgtgtactatgtatatatgtaaataaacacacacacacacacacacacacacacacacacacacacacacacacacttatgtaacaccattaataaaaacccagagacaaatattggggttcaagctcgtcactagctttcacctctacctctgaccaaagggctaattttgtctccaggagctctcaccaagcctcagactggtgcctcttctcaatgtggctggagaatccatcttcacatgagatcctttgctttttatacttccctagtgcaggaattaaggtgtgtgatcccaagtgctgagatcatctttgggtgagttgtttctctttagaactggatcaattttgtgtagctcagtgtggccttgaaataacagagatccatctatctctacctcccaagtggtgggattaaaggtgtgtaccaccactgtctggcttctatagctaactagtgtggctgtctttgctttttgtacccttaggcaagctctaatatattgtaagtaatatatcaccacatacttattctcactgtatggccctggctagccagacttgctatctagactaggctggccttgaacttacagagactggcctgcccctgtctcttgggtgcggagatttaatgtgtgcaccaccattcccagcttttataatactttcataaagtgcttcacctagctagcaaagtgcctttacatacatgatcttatctgggatttacaaaagatgtatgtaggttgagctgtctcccattttaaaaagcaggtaaaataaacaaggttgagagtagttaatgatttgctgctgggcgggacccatgtgacaaactctgctgtccccttttaaccttctacagtactcgtatgcaagcaaagataccactgacctagtaataacatgccttaatgtggatttataaatattaaaaatgaatgattgaaatttatctgtactctgaggccaagagttattgtgaaataggagttaagattatgtaatgtaatcaaaaataaatatctgggctccttccatagttattgtgcatacttccttaaacacttgataagagtatcttttgtatgctaacaaaatagttggcgcctcaaagtgctcctagagaacttcagattagccaaaaagaggggtcataagtggactattggcaccctcacactccctcctcatgtgtcttaaagggaaaagggctgaggtggtgtcaatcaccagtggggatgactattccatatatttgtaatggcatcagcctgaaaatctctgaaagagagacttcaaagagcttcctgttgggtgaacacaggaaaaatggcatttccggagagacccgggaacctccatacccctgcccatttgtctttcttcttactgctcccaagccgtatcctttataataaaatgacaatggcaggcagaatggtttttgagttctgtggttcactgtatcaaattactgcaggtgttccagaaacccctgaaggtagtcagacaggaggaccaaggttggggttagggtatagctcagtcggcaaagcgcttgcttttataaacagactctggtttccatgtcaaggaattggggtagagggagatgaagcagagtgccagtgccaacttgggacttgtctgtagactacgaggcaggggtggttttgtaaaactgagcttctgtggcagaattcaactgtagaatacattcatggtatctggagcgttggagaagtggttggttagaaaagcagccacagcaagtgttgtgggtaggaacactttggaatgctgtttgtgctgtggggcagagagaaatccagtggtttacatcggacctggaaccttatctcatttaggcctcctttggtagagctttcacacagtcttctagtgagataaagactctcaatactaataggaaatcatgaagaaggtaaacctggatgttcaagtgttttatgctggatactgggagctaaaagatgaattatgcatcgtcttacttcacttgtgtttgttacagaccaatttctttcctctaaggaaaacactgataaatatttatgtctgagctctatatttatagcctcccatgctggtaatatgtgaccagtggagtccttgatgcctcagaggagtgaccaggacaattactaagaaaatgaacagaagagctggagagatggcccagcactaactgctcttgcagagcacctgggttttatgtccggcacctacataatggctcacaaccatctgcaactccaattccaggaaacctgacactcttttctggccttcacagattctaggcacccacgtggtatacaagcatgcatactggcagagtgcccatacacataaactaaaaataaatcaatctgaaaaaaaagaaaatgaaatgcaaatccacagattctcttatgaaggtgagatgggctggagttcgggggtcatccatgtcccccctcccttgccagacacatgtgaatgttcctgttgtttgcctgaatgggaggtgtcttagacgttgcctcaaataaattcttcaagaaagaggtgcttgctgaccgatccagaggaatgctacaggtctagattcagtgcctggagcctggtcagggtgagtggctttagggactccttaaaggaaaagaaagaaaacaggagctgaaaagtaacctggtggtaaagtgcttgtcacacaagaatgaggacctgagtttggatccctagtaccgacataaaaagttgggcatgatgctgtaaatttgtaaaccagaggtgggggtggggagacaagcagagccctggagctcattggccagccagtctgcccaatcaatgagctccagattcaataagagactctgtgcccctaaatgaggagagtggttgagaaggacacatcatggtgaccttggaccttcacatgtatgggtacacatacacacacatgaacacataagcaacacacatgcacgaagaaaaagaagaaagagggggtgggggaggaggaggaagaagaagaagcagaagaagaagaaaaaagagaagaagaagaagaagaagaagaagaagaagaagaagaagaagaagaagaagaaggcaatagtgacccaaatgtgaatcaagactctaagacattttattccagagttggaccactttcacccatgtacttaaccaaactgttaatgctttccttatgttcttggaaaagataatgataataaataataatagtatgagagtacgatttatgcctcagggcatttgataattggctgtgtaccctcagagtagctgaccttaaggaaaacattttaaatggcaacttggttacggttttgcaatagatccttaatttagattcttatgcacagaaaacactggctctaggcattgctgctacgtccgtgaggatagatttattttgcttatacagccctatatttattaggcagatgcagatgcatttggaccatctactgcattcttgcattctgctgaacactaagaataaaatggtaaatgcggtgtcctcaggaccagagagaaatgccttctagtcaggagaagggagcatgatgccctgctgatggaagggggaggtgcacgcccgaggggagagaggaggtgagggtgagtgatcaggattcttggccttttctggtaattttccttaaagacacaatatctttaaaaaaaaaaaaaaaaaaaaaaaaaaaaaaaaagaccagtgacaaataacgattctcaaagttgacctttactggtagcttgggcagaatctcttgcctaatttcttcagaagtaaaggaaatgacttgagtgacaaattatagattctgcagagtcacaggcaagctaagtatttaactttgtattaagggttgggcccagcgtaccttgacaaacattcgaagcttgccagatttgttccttccaagtatcacacttagaaaaagggagggcctactagatagccttatgaaaggggcaagttaaaggtgggtattagtcctgttagattatctgcacatttacgtattatgtaaacagttaaaaaaaaacagcttagtttagcaacagcaacctaagaccaagagtaaatttcttagaagttttaaaataataacagcatagttttgtttttaacacagattatcttgttcattaattttagtaagcacagacaaaaatttttatgacatttttctgtatagctgtgtgtgtgtgtgtgtgtgtgtgtgtgtgtgtgtgtgtgtatttgtgtgtgtgtgtgtgtgtgtgtatttgtgtgtgtgtgtgtgtgtgtgtgtgtgtgtgtgtgtgtgtgtgtgtgctggtatgtacatgtgtggatgttgtgcatggagaccagagggtcagcctcaaatgttgcttttcatgactcagacttcttacttttggagacaagatctctcatatgtgtttcaatatgaataaccacagaggttaggtagctcataagagaccagtggggaggagagtctagtgttataaagagaaaaggaggactaagtagaaaagaggatgggagggcagggtaagggagagaatatgaagatggacagctaacaatgaagaccattgaaaagccatatggaaacctactgtcacagacacttccatatatatatatatatatatatattatatatatatatatatatattctttcatatatatatatatatggagtcaaaatataaaacctccactaccaagaatgggttaaatcttgctgagctgttggccaaagggatgcataggctactcccaaacatcaggagctattgctaagactatgagttactgtccgtatctaacctgataatacagccctactactgaagatacaacttctttatgtcattcaatgtggagaaatggagctggtgcccaactgaaagtttcaccctactgacaagtactcatggttctggaaagttctttgctgactggcaggaaaaagacattatcaagtttcacccagtggtctatctgtctgcaagatatactggtacaacagtggtccgaacattatggaataaccaaccactctttaaaatttgacttaaggcatggaacccatacctgatactgctaaagtggccaagaacctaggactagagaggtcataggcctaggggaaaacctgctactagttttctgctaaaggaacatagcaagaaaatgattcttagtgacgtaatgctatacccacagagcagagtatcacttaaccctcatcagagacgcttcttgcagtagatgggaattagcaaagagatccacagtcaacaatgtacagagagcaggaagctttggagcccttagccctaggtgggaagtctttatcaaactcctcccttgaaaggtcagggatccaggtagaagaggagacagaagttgtggatgactccaaggaaactgtcttgcagacacagcagtgctgatagacatatgaacccacagagtctgtgagagcatgcacaagacctgcacaggttcaacccagacaaaaatcccagcacttagaggggacgtggacataaagtcccacctctaaccaagaagctgtttgtagttgatacctgctggggaagggaaatcagtctctaccccatcccagagtgtcactggatatgtcagtcacactccagggcaggccccatgcccaggagtggtgggggcaacatcaaacagccaccatgcttttgtgtgagcttttggttttgttttggcattttttgtcctatctcctttttttgttgctgtttgcctgttgttattttcattttttgttgttttgttggttccatgtttttctttagagaaaaagagcaagaaaaacaggaagtggggtgttgggaggtgagggaaaatctgagaggagttggtgaaagggaaagaaaaaaaagcaaaattaaaaaaaataaaagcccccaaatacacagaaacttgcagaatataaagttacatagctgtaaattttgagatagctatcagataaaattatcatttctgctaaaacttaccagccatcaaagcaatgcgagtaagacaaaatgtcagtacacatttgaatattttaatcaaataacattgattgtaacagtgtggataatacatatgtgtgtgagatgtgtgcctgtgcacgtgtgcagaggccagacatcaacatcaagtgtcttcctctatttctcctctggattttgagacagtctcagaatccggagctcatcccattggctaggctggctggccagcagccctccaggattagcctggctctatccatctcctagcactggggtttagagtcactcttggcttttatgtgggtgcttaagatctggactctgttcctcatgcttgcttaaaagtctcctcagttctaaaaatgtcttttaaaagaaaacaaaacagaaaataaggtagctaagtgaaagccacctaagtaaggagttggaaattttaggttaatttctgattcaggaacttgtgagtgtgtgtttgggttggagcaaaagtgaaaagtcattttagggaggcgaggaggtctaccacagtggacacgaggaggatgaaggcaaagtccacacaatcccttctgtgggaaagttgagttataaataccacgagttgtcaaacagcctgctcaatccatttgtcaatagtgatggactggagtatgttcattttcacttaagaactcagaacgttggagcattcagtgatgaagtcatgttcacacgtgattttgccaaatagtttattcaaagttataaacaatgtcacagatatagtcggctacttaattattatttttaagtatattgtacaaattcatatagtcaatgttgtggtttctaggggtatgacatggattgtgtttttatttttgtctctgttgtaaaacagtgaaaattaatgaaaaagttacatcatgctataattgttatgatcttacacagcaattccccaaccttttttaccatacgtctcatcggctgttatatacattagcttttatcaactgaaaactaatagcttacactgtcagaaatggtcatgttatattccatcagttttctgttatcatctttcacatttactgtacatcttaagtcaataaaaatgtagtagaaattgctgttgtctaggtaagcaaagctattcctttagtagattaaaatattactatatggttaacataaattatactactttagtaacagtaaaacacacacaaaaaaacgtttagtgaacaaacttgaaaccattaggtatacataaaattctgaagtgctaagtaaacaaagcagaataaaagtgttggcatatagatgtcagagaaaacaagaatgacgtttagggaggaggagatatgttaaggatatgttggtcaaaagaaccaaagaaagagcaaaagttaagctaatatattccacagtgagcagtgccaatgtgaacccaaacaacaaaagaatttttgtgtaaggagagcaagccatagagaaatttcatccaagttgatgcacacatccaaagtgatagctcttgggaactggtgagaaggacacagcagggcgtgaacatagcccatagccagtgattgaaaatctgaagttaattcagtgtctttctagtaagaggaccgcacagtggaatcccattctacttagacaccctgatgtatgtcctggtcagtacttacagaagagtttaagtttgttaaatatggccaatgatttcaatcacagttatgaatgaaaatgtgttccatttcctaacgtatgcttggcttacttaaactgatatctttaaaaacatcagaattctaaaaaggaaacaagtagccgggcaatggtggtgcacacctttaatcccaacacttgggaggcagaggcaaatggatctctgtgagttcgaggctagcctggactacaaagtgagttcaggacagcctggactgttacacagaaaaatcctgtctccaaccacctgccccaaggaaacaagtaaaggtaacatcattccaattcacaaacactggcttttttctctttaatttttcagttatcctgtctttccacacatttgtcaaacctgtctaggtgtgtaggtatttggagtgctagatttcttgacagaaagagctggtctgagggttgcctggggcatctatcaatacatttgttgctttgttctgagtgagaaacagtcaccctgggcaacaatggtcctcagctagctgctctagtatttcaaccttttgtttagaactggataaaaattgtgtatttttttaaggcttttaagatggacccttgtctaaagcatagcatgagctatggtgcttgctcatctggagagatctgcaagtgtgaatttgttcaggactcaaagcagacaaaagtaaatgccaaggctgagtgtcttttggtttctttaccaatgccctatgccatatattcatgtttttattgcatttgtagttgtacagaggaaaagaaaagtatttttatatacaataagataaacattccacagcatcttaaccattcccttagatgtctctttctttctctcactctttctttagtggtaacatttaagttgttcaacccagagcatacaagcatcttattccattaaactttagaaatcttaaacatgatattttcactttcattgttcttttcttctactagagcaagctggttgtctttcacacctatgtatgtcccacgttgattcttacattcgaaagaaacatagtcagaggactttttgtgaaggacgaaaaagacctcttctggcagaggggattgacacttttccagctgagggaagaagagaaaaagccagtctgtgagtgggaagtccagggctaacattgcctccctgcgctagaacccatgggagaataatcatttgtaatttggtctctctagcaggtgtatttgctgagttaaggatggaggagtaagcggtggagggaacggcagggggcaaaggatggagtggagtgattcacttggtacatttagagcagctgcagctgcgtggtgtagactgagcggatctgtatgtgatcctctggattgatgctcctcttttgctttttattgtttctaatacagagaacatggcgctttatctagcaaacttctacttttcttttttttttttttacatttttttcattttttgattttgcttttacattccaagcacagttctcactctcaaccctcctcctaccccctcgcccccgcctccttccacccctcttcatctctcccctagcccatttctcatgggtaagggctcccatgaggagtcagcatagtctagcacaataggttggggcagagccaggcccctctcctatgcattaagactgagcatggcatcccaccatagggaatgggctctaactagctagctcatgttccaggtttgaatctaaccagcattccccatagattggttcatttccaatttaaatacagacatgttttcatttaattttaattagatcaatattatgattattgatgttatctttagggatttattttactttaaaatatagacatgtgagtatgtctctgtgtgggtacgtgcacataaatgtagacacccatggaggccagagacatctgactgtctcgcagctggagttagaggtggttgtgagtcacctgacaataaatactggggacccaactcaggtctcaatctctaaggacctacaagtggttattattttaatccactgagttttgagatagtttgttgcacaatagctgaccagtgtaattattccatcatacacttaacattgaggattaaagagacagggcttgtgaagcgttaagcaaggacttgtaccatgacactctgcccttattttttattatatatgctagatcttacattatacacacttgaggatatcctcttgagcagagtgctgaccactgtctgctgcttatgttgatgtcttacatgactggatcactttaaatttggcatatttatagaaattgtcttccttatggtgctgtcctgttttcttcctaacttcctgctctgacttgtttgcttgtcaacatgctcctaattttttgtcatgaccagtgtctacctgccatttactaagtaagaatggatcagatgtagaattttgtgatgctaataactgctgatgtatggacgtgcttgctgccctctccttgacagacttggatcgaaaaattaatgaatgtgtaattaatatatgctatttataatatacatcaataatatataacatgtaattattacggaatttctggtggaacacagccaaatggaaagcatgcgtgacccttctgcatgaaagtgcctctcaaactgaagtgaagtgatgaagctcctggggggattggtcagactttagttcagatccagttgtgggggagcctgacatcctgctttctagcaagttccctggtgagtctgtgctgttgctagagaccagactcgtgttgacaaggccacaccgtacttttctccttcccctccttctgagcaagtcattagaagtgactgactgttttatttacaacagcatgcacacaaactctgtcttcaaaatctccctaaccctgaatatacacaaacaggtagaatcaatttgtgacggttacgtagtcacatttctgttaccttcacagagtggttcttgtcattggcatgcagcctgatgtctttatctttgataggactcatgttcaccatcagtagcttaccatccacaccatcaccttacaatgaaaaagataacatgtgaagcaatgcagttgccacttggctgcactctaccattctgcaaggtagagatagacgacagctacttccaaagctcctgagagatgcttctgtggttaagagcatctgatgcacttgtagaagacctggattcagttcccagaacccatagggtggctcacttacagggcatccattgctggcttcctcaagcactgcatgcatgtggtacacttttatacatgcaggcaaaattcatacacataaaaaaataaaatcttttttaaagtctcctattgtgcatgattaatacaattttacctatcaattaaaaataaaaagaacagaagaaattataagtggtccaagaggaggaggttaggtttttaatttctgttattgttctgattttttctaatcgaattggttccaatggacacgactttggacttcggctcgtctgtgtgcatatgaagccaccaccgagttgtcttttaaagatgataatagaacatttccctgcctgtgttcccatggctcagtgtagcttttgggctaagttctgaccaactaaaggatgagaagacatgggatgtgtaatttctagtgtcctggaagggaaaaggaatgtactcactcgccttcctctctcttactgatcggcatagtaatgagacatgagacacggacacgatgatgatattgaaggaactgtctctggacaacctttgagcagaatctttctagctgaggcggaagaccgggctgtattattataagtagcttattattattatatgtagttaagcctttatcctgctagttcagaaatagatggggtgggataagtgctccaagaagctaagatcttacaatgagcgtggggttgaggataacctttcgagcctctccttctttattagggccactttagattcatccctgaatgagaatccaagccccacctccacatacctgattcattcgaggaacggggagactcatagtaacgtagcagcatcttgtctgaaagacaacatggtatcacttggtgagagacaattgtgtctaaaggcttccgttccatcataaacagggccaaaaaaccttgccctataccttgccatataccagtgaaagcaaaactttagtggttcttacaaaaacttcaaaatatattatgcactgatgaattcttcagcatgggtgttactgcttatggcagagaggtatgctttcacaaaagatttatgctatggtgacactgagaagacacttggaaagacctagccataataaattcatgtggtctctctttccatatttctcaacagttatttctcaacatttgtatttcttccctgaagaacctgcctacatggaacccttcttaacacaggaaagactggaattagcatagatgatgaaacccattgctgttgaatacctcaattaatcaattgttgataatttagtagatttttttttttttttaccttgccagtcatcattactgagtatagacatgaggaaatagtctaaaatttcctacctttttcttggtcttttccagagtcttcaacattgatcacatagcgtccattctccaaaactttgaagctaacacattggtcattgtatgtgctcagggaggcacaagcctctgtaaagagtgaaattgctgtcagtaaggataaacaacaaaccaacaatcctagcaacaattttcttggctattttttgaagcaattcctctaaagatttttttttttatgtgagctatactttgtcattgtaacatgggcaaaagccatgtatcatagttggtaccagggtagaattataggtgctagcttctggcatggtggggctgggttgagaaggaggacagctccattttaccttcctacagtctagggggttgtggaaaagaatggtcatgttttggaagacataggtgaatgtatgcccctttataaagaatggttacttagagatgcccaacgctctaggaaactggttctcagcctgtgggtcataatagcccttttgggagttgaacaattcttacacagggaacaaataccagctatcctgaatatcagatatttgcattacaattcataacagtagcaaaattacagttatgaagtagcaacaaaaataattttatggttggggggtcactacaacatgaggaactgtattaaagggtcgaagcatcaggaagcttgagagccacagctctaggagatgtagatgtaagctagtttgtgcctttgcctgagaggcatacagagcacatgataccatttttaaagcatatgtgtgtaaactgaagcagacttggaccactgtgtgtgtcctccattaaaatttactgtactttctacaggttattgaattttacaaataaaaataatacacaaaataagaatttgtatgtgaacatctaaagcaaagtaatttaaaaacagtttatgacaaatgaatattgattcagagcttaatattatttgtattaaatatatattaagtacatatactaaatacatactatatgtgatacatactaaattgttttatataatatatataaagtatatattaaaataacaacatgtgattcttaatcatttccttagtagtaggttttttcacttattaattaattaattttgggcttttttttttgagacagtatctcactatgcagttctggctgtcctgggactcagacagacagaccggaacccacagaaactcacctgcttcccaaatgctaggattaaaggcacatgccactatgtccaggactcacttttattttccccacattgacagagattaaatgcagagcctggcacgtgaggtaagtgttctgccactgaattagattccccggactcgcttcagttcttgcttatcacagttttattcggaacttggcacaaatggtaagaactttattcttcaagccatatcatgttaaaattgtattttaaaagacaatagttctttattcactctcatgctgaaaattgtgaaatttggggagtaatgcagtttttttctctctcaaaggataattcttttatcaggactagcatagacatgattcaaacctacagcaagtattccaaaatatcaatgcaatgctaaccagagaacacacaggcacagctccaccgcacctagcagaactcttgagtcttctgtgtggagtagcactggccaaggccccgtgatttatcccacacctcacccccacaaggtatcctgtgaccagtcataccttggatactctctctgtcaggtgattcggcactttcttggaaactgcatgtcttaaacagggagcgcttcacagcattctgggagtaggcaaagaatttcctttcacgctttctacctgcaagacaacagtggggggtggggatgaaccatcagtctccattctgcaaagattccatccttttttgacaggtaatatggcagcagcggtaagtgatcccagggtggtgctcacccagtggtctaatgggatcagtacctctttaagggtgaggtcttcacttgacaaaccattgtttccattcacactccagcagagcttaccaagaggaagaaaactgtttaccacaattgcaacactcaaaagcagccactgtgaaccagatagtgtacttcctccatagcaaaaaaaaaaaaaaaatcaccccaaatgattacgtacttatttataatctgttttcactcactattgtatccatttctcccatgtgactgaaatccccctctaaaatggcccacgcagtatcatctttactcctttcctcaaggagaacttggatgaggaaaaactgtatagatagatgtggaaagcaaaagctactagatgccatcagtctgtcaaggaatgaacttacctgattttagtgaataactttcggtgggttccttctcaaagtaacaggtctcctttcttatggtaaggccagaacggagcctcatatagtagacatggcaaatttctttggtcttctgttgggatcctaacaataggaaaagaaagcatagtcttctgcaggtcatatcctataaatatatacagcacctccaacagagactgtagtagtactacttggctaaaaattaacttggctaattttatagtaagcaataggatatgttatgcaaaatgaaacgaagtcttctacttctcgttattgggactttgtcaagaggcaaatgaaaagagaaaaggactagttttgctcatgcttcaggtcctttatagaagggaaggtgtggctgcctgctcacatctcagcagaccgtgaaggggagagaatagagaataaatggtggtgcatagctgtctttatctgtatcctttctaattggctccggatccaggccatggcacattgcagctgcccattttcagggtgggttgaaattaatcctgtctggaaaatgctgtcgtaggcatacccaaagatgcgccttcagaatgcctcaagcagttcaatcaagttgacatttgaaattaaccatcacagaccttgggatctaacagacaataggctgggattgttattttgctggcaaatgaactgttgaaacctttaggtctttattgttgttttcagaatgtcatttgagggatcatggctctatattaagcatgtatcagcccagccattgcctaacccaggggaatgttgacatccatacgagatttgagctgttttcctgttcatcttgaataaacttttaataatttttggaagaaggctgaaaactataaagggtattgaaactaaaataactgccattaaccaagtatcagctctaggccaaacactccgccaattaatttcatagcccttttaatttagctactcataataatcttaagtgttattatcatagctttacaatgataatctgaggcttctaagaatcacaacactgcccaagattacatggtttgtgagctctttaaggagtgtgttaaatgtcatcatgaactcttgtgcttggatacttggtcctcacctggtgctaccctttgggagattgtggaacctttgggatgtagggccttgctgatacgcatatccacaggggccagtctcagaagattatagtctggtctttcagtttcctcctcctggttggtgccataggagaaactgctgcaagttttggctgccatagatcaaacggatccagccaccctccatatcatgatggactgtacattctaagccacaaagcaaaatgaattgtctgcctttaagttgcttctgtaagttttggccatagaggtgtaaaagtaattaacatagtatgtttaatatcaaagctattcattagactctatcaccactgatgaaaatgaccacagtccagatgtggccacgtctctagtcccagcactcaagaggttaaagaaggagggtcctgaatattcagataagtctgagctacacagagtcttatttggctgggggtggtggtggtgaaatctgccctgctaaccaaatacaaattcagtcagctgaactaaaaaaataaaaaataaaaataaataaataaaaaaataaaaaaataaaaatcaaccagttgttcagtaatcctcattttacttagccaaagaaaaacagaaaattccatttgtgtcttagacatcataaatagcctctcagggtcaggttgaaacaaagactgtagcatgtgagttgtaagatctcaataatcaaagtgaactctggcatcaatgtcgggaattctgccatgtctactccataatgtggtatctataatgggcttcattttctggatactaagactttgtttctctttcattgaattctaaattctgagtttattagattaattgtatttgatccattcttcttcatttggggcctgggtatcttcctttgtgtttctctcccttatcaataatgagtaaattgatacaccaaaggtcttggcaaacatgtggagtgagagtgtatcagtttagagatgtgtccgttaattaggggaaaggttttgggatttgatggcaggagctgtgagaagtgtgaagggattgatataaaaaagattgtagtttactaagtttacactcattaaaggtctatgttatctaatccagcactgtcctgtgctgtacccaataacaacatgagccacctccctttccctttcagttcgtatgttcttaggtgttaccggcaaggtagcatgtctgaacattgaaataaaatgtatttgataatacatttcaaacagcgtgtaacagaggaatgctgatgctcttacttcttagcgcgcatggtttcaccagggctttgcctgttgcgctgctcagcgtggctggggaaattctggaggttgaatatgtcattttagatctcatttttcaggtttctgtgggattaaagtacaatattagtacaactgtatgtacttgaaatcaccagaaacaaccttgctaactcaacatgaaatcgatagccatacagaaaaagtaaataaatacacttgggcatagtatcctgactgtgcccttgtgctagaatctagccatagaatgaatagtaattattttaagaaagcacagaaaagccgggcattggtggcgaacacctttaatcccagaactcgggaggcagaggcaggcggatctctgtgagttcgaggccagcctggtctccagagcaagtgccaggataggctccaaagctacacagagaaaccctgtctcgaaaaccaaaaaaaaaaaaaagcacagaaaaatctcaagctgagtagatttattgttagtggcaatgtttgtattgagaccttaggattgttgtgttgtagtacatagcaaaaatagtagccatacagatgttgcatgattttcactgtagggggaaaaaatacaaaaatatgtaaatcagaagccaagacaaattccttgtaatgataaatttagtcggtattaaacgaatgcccagcagtgtgtgcgcatatgttgttttctaaatattttatctgaataaaaggaaccatgactccagatacagggccaggaaagtaataatgaacgtgaaaacatgttgcgtcagaaaagcgttagttagttaaaaactaataaggttgtctcaaagcgtgcgggagccaccttggagtttctgcctgtgggatttggcatcctctgaatattcaaaaagtaatgatggtgatcaagaataagcataatttctcaagttagaagatcaaggtaacagaggagaaactatattccaaggagacagggaatcaaggcgagtggggtgggtggtagctaaaatgcatgacaaactaaaagatgacgaaaagtaggaagcagtccaaaactccagctgggctccctgcatgagtggaggatggggagaggggctgggaggggtcaggagggagggaagcagcaatcacgtggtcagccccgtttgggtggccataatgagaacaaaggagccgtgctagctacgggagaagcccatgactgacaagacagcacagttctcacaagcgttaaatccagggcaggcatttgatctgaggtgagttctctctcactgctggctagcattaaggagacatctcctcactctctgtaacttagagcgttgtgatcaggaactatcttcaaaggggacctattgtttgagcaactctgtagatgagaaaatacaggcaggtgactagtcaaggtgcctgggaacactctgccatagtgactgtccaggagaagacactgtaagaagacgggatgacagatccactgagaagttccagtaacccggagcctgggctgtggaagacgcagtgatcagaaatcctgtccccttgtggcgaggactgtgatctgtagcttgtgacctgcctagactgagacctccaagcctgcagctgcaggtttctgaaaaaccaaggcaggcagatcatcactctcctcccatcactctctagtaaacgaggtgaactttgccatctcgtggactgcagactgaggctctctggaatgaatgggaacctgcccagcctacaggaagtagacagcagcgtggggctcaaaggccctacaaatgcaaacgaagaaagcctctagactttattattagagtctagcttaaacagagccctgatgcagacgacatgccctccacgccagcctgcttagcaggagaaaacacaaacccactgccctctccacacggacctggacaagcccttctgtcccccttttgatttctcttccatttaaaaaaactattatttattattttgaattttaatgtttttcttttctaattttattcttcttttatatttgagttttaaatctcttgttatcttccgcatatcgttgtctttctttcctctttttaaatttttttaaaaattaaaaatatgattacctcattactcaggcaaatagaaccatctaattcttgacagaggtatcaaaaacatataatgaaaacaaataaccttaaacatttttttaactgggaaaattggatttccacatgtagaagaatttgaaagcagaaacctattccttcttaccctgtgtaaaaagaaaaaaaaaaaaaaacccacagaaactcaaaatgttatctattctatctctccattactatcctacctctgttttctgttcagagaggggttaaaaattaactactctataaaagttataaccatgtattaaaggaaattatttgttctgagccagtgatgatgactgatcctggctcaggaacatggatttgggttatcctaataatgcattcctaagccaaagcagttccatgaagtctgtaggacaggacaaaggaagtcataaaccagtatatacaacaactgtattagttaataactgcggggagggttgggtcggaacttgggattttgttttaaacgttcctctcttcttgtactcaaagcatatgctttatgaagatattggcataaggcagagttccctgaagaagctgtatgcgtgccgattacctcacacactcttctccttggctgagtaaaatattgtgattgtggagatgtgtaagatcaagaaccagagtggctgtcttaggctttttgtgtaagcaaccatttccttttaataatgatacccaatctgatgccctcagaatgttttgtttatgcttagtgcaatgctaaggcactgtaagataacatacaaaacctacaagaaagatttcctcatttttctatacctactgctcattgaatatgttgcttatgactaatgcagctgttgactgtattggtttatgacttcctttgttcattgcctgcaaaccttcatgtaactgctttggtttatgattgaattctttagggtgacctgaatccatattactgagctatgattagtcaccattgctggcttagaataattgattttctttgtagcagacctgtaacttttacagaatagttaatttttaacccttatgcgtgggatcatgaggctaggtaaacatattaaggataggttttcagttggacagaaaatagtttaaatagtagcctgtaccagtagggaatgaggtagcacagcagaatgaacattgaccttctgagctgcttcaaaaactgtaatgggttttgtttgctctttcacccaacagtacatgtgtcctagaaacaacatttttctagtcaagacatagaaattgcttttaaggggagggcgagggaatggggggattgatatgtaaaataagattgtttctaaaataaaaaaaaagaaattgccttttaaataaatctatatgttgcagtctatagcctatcttcttggagagttagaatccatggtagcatagtaaagacaccatagcccccgactgaagtgttgtgcctggctttgctttattttcagtgattatcataaccttctctcccttcgttacttccatggactagcctgagaaaacacatttggaagaactcttctctaaagggccatttgcttgcgtggttgaacaagataaaaactaagagataaacattgatgttggagtcatcaacgtagaaaatcagattcattattacaattacaaaatctagggtatgcatgtaatccggatctgttttccaatcccattctgaaaaacaaaccactttactcaatagcaagactttagtctttttagatcagaactatttgagagcctataaacagtactgtcccccccgctgccagcaacagagagcaaatattcttgtagattggtgtggcactcacctccctaatggcagggaatagctggtcttgaataatgttcgttcctgcagtcagcactagctgatagccagcacagtcacattccagttctatttatacggtagctcagattaagcaatgtaggtggcagaggctgatgaatgaagctatgcaaatagagctatctgaatgggctagaatgtgtgggtgtgtagctttttcctacaggacaaatcccaacagagtagcaatttcagaatcatacttaattagtaattaaaaatatataatctttaaaacagatgctcaatggtgctttttctggattatagaatagtcaagggaacagattgtctctactatagaaagttgggttttctttttctaggtaaatttttttttctgacagtgaaaatgatatatgtgccctcagaaaaatatgtcaatatctagaaagtactgatgctatcagatttttttccctccatgtgaaaaagttgcatgtgcacctattttaaattagaaagtagaatcatactgcaaatactttgtgaaccagctttttcattctctaaaattaacactgtatcctaggtgttttctgctttgagttatgtatctttctttattccttcttatcccttctaaatgaacacattggctgttctcaggcttttcttttctatttccctaatactagcattccagcagggggtgggggagtgcatgtgtgtgcttcttagaaaactttgaaattcggtggtaacatatatatcataatagcggaatttacctctggatcgagaggtgctgacatttatttatttatttatttgcagttatttctatttgacttctagaagcttgtattggtttgtagtttgtcagcagtctagctgagtttccttatccctggccctgaagcagcaatagttgttgtcacctttgacacattcacctgtctgaagaatagaaatactttctgttatgactccgtgtattggagtcttggactaaataaaaaggagaaaatgagctgaacactaatatgcatagctttctgcttgctgggtgtgaataccatgtgaccagctacttcagtgttcctgctgccatgtttgtggccatgatgggctggacagactatgagccaaaataaaccttttcctctcatgtcccttttgtcgggtattttgtcaaaataatgagatataatctgtaagtcaagaaattaaaattaagcccatcagcccactagtgatgcttgttaaaacattgtcccttagtgctatttatctgatttttttttttttttttttggtttttcaagacagggtttctctgtgtagctttggagcctatcctggcactcgctctggagactcacagagatctgcttccctctgcctcctgagtgctgggattaaagaccaccaccgcccagcttatctgatttttaaatgacattttaatccatatggttcttaaatatcctgcggaaatgtttgatcagaatttttgcttaaaaattctgtggtttgtgtcttaagacatctttctcatctatgactaaaaacaaatttgcttatgttatttccgaaaatgtttaactcactattactataagcatagaaatgtaagttgtggtcagccatggtgacacacaccttgaatcccagccctctggaaacagagtttcccagaatgaggtcggccacaagtctctctctctctctctctctctctctctctctctctctctctctctctgtgtgtgtgtgtgtgtgtgtgtgtacacatatatttgttgttgctgctgttgtttttcaactgcttattctggttacatttgcaatccagcttagataaagtaatgcttcagtgtgttgtgctgtcctcagtatgtgcggggctgtggatggagtaaggacaacggatagccagaaactccaaaacctatttatttttatttttgaagcaggatctcagtatgtcatggcctgggattctccgtgtagaccaggctggttttgaactcatagagatccatctgcctctgcctccaagtgctgagattaaagtgtgtaccaccgtgcctaactaatagcagaaagctttttaaacattgataaaattatgtgagcgtaattttctgaatatgtaaaatcccaaaggaaaagagagagagagaaaaaaaaaaagaccagtttggtggcaaatatcagacaaaaagtagtgaaaaaagtgatggggtcatgttagtaggaccagtgtgaagtataagaagctgaacatggactattcacacacatcagagttcttgggtgtcaatatgaggaagtccattgtcctaagtcacaaaacaaaccgaaaaagtgtcaactgtaatccgttctaaagtgcaaatgtgtagggtagcctctttggtttttagaagtctacattcaacaaatattgcattcccattttagaccagggactatggagcatgagcccatggaacacgatgtgaaattttcttttcactttgttatattatctacatctggtcaaccagcaaatcctttcctgaaacccctatgttctcttagctgtctagtgattccctttgcactcagaatgttagtctgactgtccacctttctttccttagtagaatccttgtgaaaacttgctgaaccatccacttcctataatcaatattgctaaaatgtgaggttcttaagaaagtttttataaacttgcatgctcaacttggaaattctggttaatactgaaaagagggaattcaacctttgtcactcaagaaagtaattaagtgctttaggcatcattgcctgggaagcctaacttccctgaggtcctgaggtcatagctgtgatgggtttgggtctgtttatagagggctgcctcatgataataacaataacatgtcaagtacttcatttctaggctaggtgtctgagctgcagtagtgaaccaaatcaaagttctgccctctgaagtttactccgcattggggaggtagctactgagtaattttcacacaaatacattcctgaacactgatgtcaggaatcaagagtggggtggactaaggaagtgcggtcacaacctaatgtctaactaaggtccatccaaaaggttcaaagggcctgtggaagggaggggcagagtgccttgtaggcaaagaacactccagcacaaggcactcaattcaagacacccacatctgcttaaagaacagggggagcctggccgaagcacagatggctaccaggaacatagtacgatgggcttagagacagtagagggcaggaggcaggtttggttgggctcaagaaatcaaaggaagtaccttggcctcaagttaaaatacagaaggagccaaagaaaaatctttaagtaatatggatgtcattttcttttttcattattccatttcattatttttcatttccttccttccttccttccttccttccttctttccttccatccttctgtagtctggcagagattacattgacaatggtaagggaagccagatctgatatcaggattttttccgtaggatatgggggacactgatagaatggggtgatgctgaagtctggggccccaagttccagttcactactagccaagctttatgctctaacatgggaagaagatgcataagtctgtggtgggctctcaaaaacctgttgctagttcatagaaaaagacagtgtccctcaaatggcctgccctagttttatttgtatagctgtgctaaaatactcccacaaaaagcaagttggggaaatgagggttttaacttcagctcacaattccaagtcacgtagtccatctttatagggaagtcaaggcgggaccttcaaacagctgctcacatcatatcacagccaagagaagaaacgtgaatgctgctgacatgcttgcttgcttgtactcagctctatctctccattcctatagaccagggccctgatagggaattgtgccacccacaattgggctagattcattaacccaactacaacaatcccccacagacatccatccagtctggcccactacacacaatcccttatttaggctcttgtctagaatggttctaggttgtgtcaaattgaaaccatcacatggtcctagctgatagaaaggagaagaaacagggagcatggctgttttctctcacacatcacaggacagtaatgatgcagagtggcctctcacaccagccctctgctttcttgggtatagtagtttcatttctttttcggtggaagtgagaatacaggaagcataggaaggaagggaaggctgaagtgaaagcaacctcctcatttgagttgagctgctttctctttttcttcctcccactgctctgaaatttccctctcccagggagaggaaatggtccctggagaaagctgacaaatcagtgagtcaagacagatccctcagaagggaggacagggatgatgtttctactggtaagatttctttaaagtgagaggcgctcagtattgtttaaaattatctttatctgtaaacacacgtacactcgaatgtgctcagaccacttgtgtgcaggtacccaaggaagccagaagagggtatcagatctcctagagctggagttacacgaagttgtgagctgccttatatagatcctgggaactgaactttcttctggaagagcaacaagtgtttttaaccactgagcagtctctccagccccagcacttttttcctgtgaatctctgctttgcttttctgttccttctctggatatagcattctccattcacttccatatctgccaggatgtgttccatcagcctgtatcacttccctccacaccctctacctcacaggacagacttgtcttccttggtacccacctgctctcacacctgctcaccattgcccacctgccctcacacctgcacaccattgcccacctgctctcacacctgcacactattgcccacctgctctcacacctgcacaccattgcccacctgctctcacacctgcacaccattgcccacctgctctcacacctgcacaccattgcccacctgccctcacacctgcacaccattgcccacctgctctcacacctgcacacctttgcccacctgctctcacacctgcacacctttgcccacctgctcttgccagtgacgcctgatgacgtttcaatttgacccttggagcataattcaaacatttatcacccgaacagcccacagctaaagcaactttattgcttcatctcatacttgcttatcacttccagctctgtttctgtgccccttctgttggaactcacgaggagccagggccatgctggcgtcatcatcattttccagggcactatccattgaaggtacttagtatataatctgtagtttggatcagtgcttgcctggagaatctccatgaactagttaaggcaggtgtcacccactgaagatatattgaatatcacccaaatctcaaaggtctacagagcagggcagatggaactctgagttgacttataccaacctggcaccactctgctgtttttgacctactgggtcaaaacatctgaactcagacttcttgttctggggtaacaattcttcctaaagcatttaaagtagctgaccttctggctggcccatgctctttgatgttagatagaccattcaaattgctcatttcaggatgtttcttcatttctcgacctcctcttgaaccccaccttgtactttatatattttggatgtcccccatatggtgggtgcattaattctgtagtgatttgaatctctttctctcctccatgcatcacttccccttcttggtcctttcagggtttctataggtttcccattttaaaaatgtgtgagcctggcagtggtggtgcatgcctttaatcccaccacttgggaggcagagccaggtggatctctgtgagtatgaggccagcctggtctacaaatcgagtttcaggataggctccaaagctacagagaaaccctgtctcaaaaaatcaacaaagaaaagtgtgcgtgcattgcttcctgtctcccagaatcccctttcatacctgcccctgccccttgctcaccctaaagatgccatcctggtcctcttctattcactgttatctcctgcacacagatgaggcaaacaagtctgcaaaggtgactgctttgttttgtttttatgtattgagagagctgttggtgctagaagaaagccatgtgtaatggcatgaaggttgtgtgtaacaaatagaccttaggctttagtttaactctgaagggcaaagccagtttttcttctacatttagaatggtttttaaataaaactaagtgaatacataaatgacttttataaaaattcaaaatgaatatgaaatccccaatgaatatagtttttgcttgtttgtttattcattttctctctttttccatgcccgaccaggaacacattttaaaatctatacaatataaatataattaacacttgaataagcaccatgagacaggtgtattttacatagttaaatatataatctatataattaacacttgaataaatattgtgtgaccagtgctttgctaagtgctttacatagttaacttggtcatcacagcaatctctccagggtggtactatgttatgtcttatacaaatgaagaaaatgaagcacagatatgtaagtaattcacccaaggaacagcggctaaaagcccaagcaaacactttaaggaaatgggtggagtgatccaatcctgctacattccagatctccctcaccacccctatatcccagtaaacttcctcttgcattccgggcttacatttttctaggtagcaaagggttttgtgttaagaaaaccgaaactataagtttggaaatgtggcattagacagtgtcatctggattatttgaccccatgagtgaggttcatacttcgtatacaggggattgtgggatctggtctccgtagagaggaaatcttacaatctcttatagaaaagagaaatctacgtgctgtagctagaagagggaactcaaaacactttgaggcaggaaagccttttctgaaaaacgtagcatttcattgaaccctagtggacaagcataaaaagcaaaatcagcactttattaatgaaagcatggtttctaagtttaaatcatgttgggtcaatagaaattcgactaagcaaaaaaatggtttccagcataatggtgaattagttaccatggaaaccttcctgacaagaatgctgaagctaaaactttactaaaaggaataatcaggcctagggagatgactccgtggttaagagcacatcttgcctttgcagaggatctgggtcagttcccagtaaccacatattggcacacaactgtcagtaactccagttcttggggacccaaccctcttctggtctcctgaggcactaggcacatatgtggtacatacgcatacatgcaaataaaatgttcatacagataaaataaaaacaaacaagtctttcaaagaaagaattgaaggctgcctgtggtggtgtgcaacagtaatcccagaactctggtaaatgaagccagaggatctcaaatttgaggccagtctgggtgggctgtagtgtccagaacaatggcaagccggcaaccccagttttcttcttaaaccatcttttatgtcccagagaaaagctagaaagttataccaagtgcccaggttgggggataaggcccaggacatgtctaacttctaacaggagcttctaacaggaagttggggcctagaacatgagttctcaagcagctgtgctgggagaagaggccagactgaaatagataaatgcggaacacaaagggggcagctaggaagactgtctcagccacatcccctgtcttctcctgacaagtcaggccccacatgagtgtgtatcctgacatcacagtctctgcaattctgaaacactaaactagagaattaaatggaaagcagttttagcatagcaatgtccgaaaacaaacaggaacagcaattacagagcttaaagacatttgccagactaaaaaccaccagctagtccacaggagtttcagggcaaatgaatactgtatagtccgaatttacaaagtaaacaagagttctgatgaaggcgagagtcctcagagaaaagccgagagcaaccacaaggctcccttcactggagcaatctgcaaagatgtgaaataactgattttaatatgtttattaagaattctcaaagaaatggaaaataggaattggaaatagaaaccttgaaataaaaacatagcactaaaactaacactgtgtaaactaagcagcagattcgacacaggtgaagcaagtccatgtcctaggaaacatgtagaagtattcgctcagctgcaatccagagacacaaacagatgggaaatatgaggggcagggaatctggagggtagatgagactgtttaatgtgtatctgagagcaatagtgaagatagaatatgggaacttttcagaacattttaaagaaagcaattcacagattcaaagataccaagggatcatgagcaggaaaggagcgggaggaaggaagggctccatatcttttgctattgttgttttgtttgttttttgagacagaatttctctgtgtagccctggctgtcccggaactcacttggtacaccaggctggccttgaactcacagagatctgcctgcctctgcctcctaagtgcagggattaaaggtatgtgccactactgtccagaccatagcttggtgtattatctgtgaacccgataaacattgaaaaaggagattataatatcagttctggaagacaatgaaaatatttggatgaacaaaagcaaagtttactgtaggcttctgggtggatgattatgtcttacattaccccagatccttgaagctgacaccagatatttgcggaagtacctctgctatttattaaacactactgagactgcagggatggccgcaaacaccatatttaactgggaaggcacatgacacagtgagctggagtctgctggacccaggaccagggtccaggtcattcaattcaactcaagggtcagttgttgtgaatattttgctcctatcttcctggtattttttagcatgttaaacaacagcaaagaaaataaaaagaacaagatgtgaggaaaattgcagtttaatctatcagggaggttttttgtttttgtttttggtgccattcttatttcacgtatgggatttaataatctattatactgctagccgctaggaagacggtgctctgctgcccaccccattcatggtggaagggaatggagccttgacttgcttccttctggtgtggaagaaggtatgacagtagaagagggaggtgtagacacatgtttaaagctcaggcacagaaagtttggcacagcattgggtggaaggcagcagaggacagacaggaataaactctgtgtatcaaaggctttgctgagaaatcaataatacagggaaagggggccaacccattggctttcaaatccatcagctcactgaactgaggtaggagaaatccagtttgttttacttctgctcactttagaactggtgtggcttgctgtctaaaatgtttgtgccctagacccacaaaggagacagtttacaagaataaggaacagtgacttcaaaatgtatcactctgcttattcacaaagagaaagtatcagatgcacccatggccaattatttctagttcttagctaatttactgcagagagatccctccaggtttgaaaccatctggagttggcagcaatacaatcaaaggagatttcgaaactgacgataagaagaagctcactaatgtgagcctggaaacagtgccgaaattccaaagccttagatggtttctgcagcatgcacaggtcctggtcctagctacaatagcttttctggcagggctctgacttctgtctggtggcttgctgtttatttttcaagggaagcatgagattttccagattgcaacactttggatttggagctagctcagcctcaaagtagagtccactgtctctttaaattgattgtctcgtaaaggaggaagcttgtttgagtcacatgcttttctcagttctgggtttatagttagagatagtgaaagcatccctaactccattcttggtgcacagagtgcttctagaacagaccctatgcacccttagacatttttcaaaggcaaccctagaaaacaataaggaccagccggaggagtttgtgaaagggtggggaatgtgtttatagaaatgaagaaagaagattctctactttaacatctaaggccctaagaaagaagcacaaagtagatacaataacaaaaatcgccctggtgggaatgtgctggctccctttaaaaagtttttatacatctcaaatgcatttctatgttttcaggccaggtaggttagttcacatctatgaccccagaattcaggaggttttggcaagaggatttccacaaattcaaggctatcatggtttacatagtgaattccaggccagcccgggtcacacagacagacattgtttcaaaaacatcaaatgatgggggatttccttctgtaaatacgtttgtcttactggttgatgaataaaacactattggtcaataaggcaggaaaataggcggaactgggagactaggagaattctggcaaaggcaggcagagggagattgccaggaaagtcaccatgtaagccgccaaaggagtaaaaggtctgggcattctccagcaagataagaccatgtggaaatacttagattgataaaaatgggttaataattaagacagagctagccagtaagaagctctaggcattggccaacagttttatacctaacatagcgtctgtgtgattatatgaggcccaagggcagtgggaccaaccggggcagaaaactgtcatcagcaacaagcaaatatgtatgtgtatcctgatggaaatgtatgtgttttcaagaaagaaagtcaaccgctgttaagtaaagtgcttgctagttaactaaaagcaaatttctaaaacttgctctgctgaactttaaaaaaaaaaagattgatcattttgtgtgtatgttttatgtgtaccacatgctcacagcgcctgagatttgtgggcatcacatatgtgcagtgcccacgaaagccagaaaagggggccagatcccctgggactggatttatagacagttgtgatccaccatatgggttctgggaacccaggccctttgctagtgcagccagtgttctgaaacactgaacctctgtctaccccagtgcctacctctttctacacccaccagagtaagaactgtccttggtgggatgtgagggagaaagctaactgtacagactcactctgtagccagtcaatcagcttgaggagcttaagtgtcgcatgtgtgacttggtttattaaataggataaagtaagcaaaaaacaaatcatttattaaataaattgcatatcacttcagcagtcttataactgagaaaattaatgggacagattatgattgatttgtaatgactcaacaatgtctttcatatcatgcctcctgatcacacccatctctctccccaccgcagaataaaacaaaatacaatttaagagaaaaaaggggggaaggtggtgagggagaagggagaagcttcaggatgacacagtgagtcacacagtaaactgctttatccatacatttttacatgcaggtgttcattgagacgaatcaggtctgattcgaggcccctagtctttgctacagcattgacattgggccctcactgggactcttcctggacatcctgctgctgccctatgtcatggagatcctgcagccctgtgaccttcttctttaaaaaaaaaagaaagaaagaaagaaagaaagaaagaaagaaagaaagaaagaaaaaagaaattctactacaccagaacatttgagacaggggctatgagaggatcttactaggtagcccagagcgacttccatccatctgttcccacctcccaagtgctgagattcaaaccctctgcccccacacccagcagcagaacattttaaaaagggcttttgatcaactgtctttcctactgaagcacaagtgcaatgggaaagcttgcttcttttactaatgttttctccccttgtcaactggaacatggcagaggtgtgctctgtccccatactcagttacaggggagactttctttcttttttttttttttttctctgaagtgtgtttaatgcaaatctcagctagggcaaaaccaagcaagcaatatttcctcagactggcagaacatgtttccaagcaatgtatcagaataattaaaatgagaaagatagaaaaacaaaacacaagcattgacaagtttgtggtagagctggaatttttatgtatgactggtagaaatgcaaattgctactacatctatggaaaacaatgtggcctttgccactaatgctcaaaaattgcacatctttggcccagaagttctactgaaggtatgcactcaatactgaggcccaaaatgcttaccaaggaatgctgtgcatggtgctggccatgcatctctaagtagggaataacacccgtgtccatctgccccgtaacagatacgctgtgctgcatttatttaggggaattctaatcagttgtgtggaattaaaagcttctgctacctgaccaacaacaaaactgcatcttagaaacataaagatgagggaaaggcaggacacaacttatggatcgttcaaaactacatatgtaaaacagttatgcattgcttagtgatgggagcacgatctgagaaatccatcattgtgtaactattacagggtaggcacacaaaccgagatgactcatgtgccacatcggcactgtaatcttctgggaccactgttgtgttcttcatcaactaaagcattattacacacagaggaccatgtatgacattgggaaacatgatagcaattacctctgagatggaatattagagggggtgaatgaggagacttggggcccagtaatcttctgattgtttatataattgcataggtttgtgtagtttatgacagttcattaagcatacaatttgttcaattaagagggctatctgaaccaatgttaggaaatagctgacaggaaagacaaaatgctctcttctgttagaccgaagagagcttctgatacacttgatcaaacactgttttctgtccctaaagaactgaaagttaatcatactaaagggaatagctgaggtgtctattaggctatggcagagtcctcagagcaactttcaaaggcttcagctgcccttcttaggtgtagacatgaagtctttaaaaaaatgaaaagcaaagctggagagatggctccatggctgagaaccgttgttgtgcaaatacctaaggacctgagtttggagtgcctgtaactccagtatgtggtaattataaacagataatgacaaaatgacttttcaggacttttagctggagatgatggttcctgtagtttcagcacttgagggggctgaggcaggagaatcattaatccaatggccagcctaggcttcatagcaacaacctgccttctccccaaaaaggactttaaaaatcaaattccatacagtcacaaaggaaaagagagagagaaagggtgtggagaagaaagaggctgttttcagataactgcctaggaggattttttaaagtattagaaacattttattgttgttgttgttaaaaatgttttattatttttaaattgtgtgtgtgtgtgtgtgtgtgtgtgtgagagagagagagagagagagagagagagagagagagagagagagagagacagcatgcaaaggtcagaggacaactttggggtgtcatttttctctcacaccttgtttttgagacagggtctttcctgtgtctaccactgcattgcataagcaaacactcagtggctttcctgtctctgcctcccatctcgccatagaactgttaggattacagactgaaaccaccacatcaactttctacgcgagtcccaggggttgaacttggttgtcaggctagtgtggcaggaaccttttcctatcattggtcccaggaacattcttttttatggtgagtggaaaatactttttaagtggtttttttttcttcagaatttgcatttacatataaattcgttttgtttttagatttgtttctaatgtatgaaatatttaaaaccttcagttaaacatttggttcatatatggaactgttaaacagccatctatctcccccaggagctaattccaaagttaaaagaaaaactgtaaatacaaccaatattaagagcaggagatctggctcagtggttaagagcactggttgcccttgcagaggacctgggtttgacttccagcagtcacatggcatgccacaactatctttgactccagttccaaggaatccaacacccctcttcaggtctccactgctacacacagtacacatacacatatgcagacaaccactcagaccataaaataaaactaaatgcatctttaaaagcaaaacaaaacaacaacaaaaaaaaccaacagctgggcagtgttgggcctttaatcccaatactcgggaggcagaggtagatggatctctgtgagtttgaggccagcgtggtctataggaagccaaagctacccagggaaacactgtcttgaaaaaacaagaataaaataaaataaaaattataaataaataaagcccaacatcagtacttaacaagtagaacaacttgtccaattatggcaattagactcaaaagaatagttgactaaaatgacttagccaaaacaatcataaaactataagttcatagtggcattcaaaaggcaaaacaactacaacatattttctgattaaaatattgtttcatagtacctttattctaaagttaatttaaatatatatctacaagatacagaaaagctttcccttgtacaaaggctatataatcactcctagtgtagtttttatgggttttctctagtgtttgtgatgtcctcattggagggcaacagaaacactcacattggctgtagagcaggctgttaaaggctctgtaatgttacatgtttcccaatacattcgctgtcacaccttcccaagccagctggcatagtcaaaagccaaaactggaatccctcccagcactggcgttcagctgccaggcttcatagacttaattgtgtaaggctggctcttgctcctgcttgtcccccttcttgggcatctccagctgcatcctagctctctgttttcagtgtttttgtgtaggattcctaatgggctcagtcctgattactagaagtggggctgaagtgaacaccttaagttaaaaagattgtttgtcgcacactggtcttctcagaggtgaggctaatgaactgcatcgagtattgaataatattagctgatgatgagacatttgaaagttaagagcacaggggctttccatacatagataatgagagagctagagaaccaagcaccaatccacaccttggataactcatcccacagtctaatgattatgcattttatgttaacagaaatggtctgaagatgtaccagcattgtgtggctgacttcacatgatgcaaaaaagcatctgccagatcactgcctccatcactttaaatgggacccttcaacaggcttagtcttcctgatctagttaatggtttggacatgaaaactcccaaaggggaaaaaaaaagacagttaagtacctctcttctcaaagataacataaagatcccgccccccccatttatcagaatactactggctttaatccatctgtgtctaagactgctctcatgggtctgacactgagaagaaagccttccacttgatgtaatgaagaagatcatagtcagatgtccagcctgatcgtcacatcctaagcatggcactctccaaacagttaagctgtttgtattcattgaattaaaagtgcccagtttattatatcaagtgtctactacataatgaaaattattatgttttcacaaaatatactcttaggtcagtgaagaaaaaaattatgccttctttaataaaaaagaatctatgtatccattccagtaatatgaacttttttatggaagtcagagcaggaggctgaagactgttgctaagtcagaatcaatatgcttaccagtttctctggctgaaactttcagaaaatatttgaaataattactgttcatgaaagcttaacactgctagtaataatttgccaagacaaagatgttatatagaaattcaatgaagtgtgtttctgcttgtgttttgaggcaggctctcattgtggagtcctggatgatttggaatttgctatgtagatctgagaaggacttatagagatctgcctgcctctgcctctccagtgccttgatcacacctggctgcaaagtacttttgaagatgattagtgtgaacatggataagtcatatacaatatatgcataagagataacagaaaatacaatccctgggagtagaaattttgaactaataaattcaggtttgaagaagttctgtttggttgtgataagatccaagtgagaacaagtgatgaaaaacatatggtcctttatgaaaaacaaaacaaaaacgtgtgtggtggctcatgcctataatcctaacacttgagtgactgaggctgggggattgccatgagttcaagaccagcctggggatttccaagctagtctgggctctagtgtgagaccctgtctcacagtcaaaaaaacaaacctttctttcaaaagggaaagggatggggctgtccagagagctcagttggttaaggcattactatgcaagttcaaggacatgagcccaggacccacataaaggaggaaggagagaaaagactatacagagttgtcttctgatctacacacacacacacacacacacacacacacacacacacacacacacacaccacaaaaggaagtatagcttgcttaaacatcatttcttaaatatctgtcactagcaagtcagtaaactaaaactgattgagactgagcagagcagccatacacaactacaaacttctgttaaactcctcacaaaaaacgtctagtccctattaggattccaggggaattaacgagcaaaacagtcttttgattattttttaagcacattctaagatgaactcaaatggctaaggattttttctttggtagtcatttgatttatgaagtgttgaaagtggaagggaattacatgtaaacaacaaagcaccttgccaagtttgtgggcagacctgtcttattcatagcaacaggaatatcaaaagaaatagagaagaggtggtagttggtggaaacatttccctcaggtagcttgtgggttcagccctgcccaaataggtagaagtgctttttctagtgctttctcactaatattttacacttgaaaattatgagaattttgaatcataagtgctcctccccagagaggcttagagacatcaatgaagttggtttagaagcatgcttacttccttgtcattttttttttccttaatgcaacttaaccttggattttaatctccaacctgaaatttactaactttgccattaggagtaagtatagtctttctaaatctcactttcttggtttcacaaatcagggtggtactgcaagaactccagataatgtcacattcagtagatgttctgagatggaatcttagcctctgaggatcacttccaacttgtggagccagtcacagaacttctcttgagtgggattttaatgatgtttatttgatgcttttgtttggtttcatatttcacatcagaggaggaaaaatcaagttcaggaatgttgagtaagatcaaaattcacatagctaataagaggtagctagatgatggacttgaagctgccaccagaacctgtttttgttgtgttttgttttgtttttttctattataccacatcacatgtttgccctaaaaaaagaaaaaaccctcaggggtataacctgacaatggcagaagcagtatgtgccaggagtctgcagcaagcagaaggtgcctcaaacttcccacaccctttggtccctctcatcatgagatctgcctgccctgtaaagttgttccctgagacatgcctttcaagggatattcagtcacactttgaactccgagtttgtgtttgagttaattaaataaaatcaacattgggtcaagaggtcaagttagcagctagctgacagaaagtaatcacagggttataggatgtcaatagatgcgataaagagatgcacaggaagcagtaggtagggactttgttttggcagaagagaagaaagctctctttcagagagatgtcagctacttgctactcaacctctctgagctagcaggttttcaccccagcctttcagttctaagtctcattgataactagaaggatagagatttaattaaaagttatatttggcagcagtgacttagccagtgcctgtgggaagagaatttccaccaagccactgcctgagtgacccagctgctgccaaagaagtatgccagtaactgtgtagctgtttttgctgactaaaacagatgtagatcaaaggcagcctctgtgccagtggagaaacaagtgcctgccttaggctggagagtagttcactggtaaggtgtttacccagtttatccaaagccttgggtatgaatcagagcaccacaaaacaaacaaaaagaagctcctgctgcacccagacaacaccaccagagaagtggtaaggaacagatgagacgagaggttctaccataattttctgaagtctgtgaaccaaccatgtttttgtatttttctatggcattgtggttcctttctactgttgcaagtgttcacatttgatctgatagtatctaactgccccttctgcaaattgatgcacaaaggggaaattctgccccctacctttggactcaccgtgtttgcaacaatggcaactgttgcataaatgatgcattgattttttttttttattggcaaagtcacacttaggttgttaaaaacaaaataaaatatttatcactggatttcctcagcagaaaaattcccggtcacatatttctctcctcacagcactgcccctttataccgtttccttttcatgacttgttttatggatggaatgtaactcttgacagttgatactcccattcccataatcatctcacaaagctcttttcctgtaacccttggcagaccctgaagagaagtcctcgtttcttactgttttttttttttttttttttttttttttaattcgcttccagccctgtctcagcctgtgcatgaaagttaaattcaccatggaaccgttttctctgtaaatgggaagcatatactgtaagttagcagggatcaaagaaaaggctgagggagctgctgggagagtcggaagaacctctcagagaagaatggggaaagtgtgaagttcgagccagagaaccacagtgcaatctgcatggcatgcttacagctccctgtttaaggggactctctcactgtgtgacaaggttcaggggcccctaagactgagaagtttggaaggtagaactgtatattatcgggcaggaaaccagacgagggttatcaggtatttgaaagacaaacaggaaaagcagttatccagggtgttgtgcccagcgtgggaccacagcatcaaggaaaaatgacttgaggaagcagtcacaggtggaaagcaagtgcagccagggaaggcagtctctggctcctgtgtgaccacagtatgggggcggtacatgctgtgctctttactaaaacaatctgaagggcatacatgcatctagagcagtttctcagttctcataatagtagcaatattacagttacgaagtaacaacagaataactgtatggttggaagtcaccacaactgtattaaagggtggcagcattaggaaagttgaggacgctatttacagagaggtaaagaaaagtctaaggagggaaacttgtcaggagcataaagggcaagcaggctgcaaagagtctcttaggtgaatgggatcaaaacaggtgagtttttaaaatgtatccatttagctccttattctcccctgccccccacccccaaacactctattctcggtttgtatgtgatcttccttttactgagatccacttgtaggcaattgctaagcataaaagtaagaagttgaattatcatcttgtttggtaaagtttcacggtgggaagtgatgtaacattgtctgatcacacactttattaatgattttaaaaaccaccagaaggaaagcaaatggcattatgagttagtagtggctatttctcacccacttccattagcaacgattttttttttttgtcagaaataagggagggagggggagctctatagttcctacgatattttctttgcaaaacctgactaaaagtttcccacaaatttggcctcaatcttaccttggcgatcttgtccggatttctctctctctctctctctctggccgctgcagattctcctctgtgcagagagctttgcctctttttattacccaggatttggcagagaaccagataatcttagaagggagatgtgggaggcaggattggggccagtttttctcacttcttttcaaaaagctagtagcgttattcttttcaacagtattaatgacactctgtcaccaactaatattcaccgatttctgccccccttcagccttttctttatatgttgatggggggaggtgagggacaaggtcttgctatctatcctaggcaggtttttttttttttttaagatttatttatttatcatgtgtacagtgcatgccagagaagggcaccagatcccactacagatggttgtgagccaacatgtggttgctgggaattgaactcaggacctctggaaggacagtcagtgctcttaacccctgagccatctctccagcccccctaggctggtctttaattcaggcccttccctgcagactccggggctggaactacaaggccaacacatttgctcttcttctctgtcttgattgtaaattttaattttcaatgatggattttatgtgcctgccccttccagactcacgccagacttccagactcatgccagaattatctcacatgtaactctccttccatcttcatgccctaattctttctctgcccccacccttcacagtttggctcatgaattccaaacttctaagttaaattacaaagcgttagctctggcactgttcttatggacgatttggtggttttatattacacttttgccaccagctgattttgaaaccttcagatgtcactttttttctttcaaattcctttataataaagtcattccctgttgcatatcagaaccatgcagcttatctacaaataaaagctcttggagctccatgtatctcaacatagctgatctgcctccacactctacccacagagcaattaagctagtgatgatgatgatgatggtggtaatggtaacagaaaaagaaagcaaacaccagtggtttgaagaatcaacaccaagacagaagaataaacccttcaggctagctagctaaggtgattatttcataggatataaagttaccattaagacaatacaaatctgtggttccttcgcagaccaaatgatctagtttgaagaaaataagataaaataaagacatgtttctagggataagtagtgtttaccttcttacatagaaacatcattgcaaagagacctatctggagttgaaggagagccaacttccttgccctttcaaagggacacatatacctctccctcagcctaagaggcaccaggaacagatctctagtgacagccagccctggatggcagcttgccagactggatgaactcagaggaacatgcactatatggtggcaagtggagggtggttatgttttaagaaagaaacaagaatgccaggtcacaacaccttcaattctttgaggagatgtgactggatggagagaacaggaagagagaagctgaaggggggaccttctcagaatgccaaccctccccatgtaggaggaagagtaccattcaggcctatgggtgcctgttatagtcaactcaaaggtcactgcattttggccctgagtgaacatggtttgctgctatttagcactcttttctaaggggaatctcttagaaaaatgagcatttctctataggcaatattcacgacatggtttttagtcgtgtttgaatactttattttcaccagggagaaacagaaaccaaatacaaatgagacaaagggcttttttgcccttctcacattcatgcaactttccccatctttctggcctcccttgggagagacttggtgacagatcctgtcccttttaggtagacttcagacagtgctgcccccaaaaagagtcttcatgtacatctgaccagtttagccagtctcatcagttctcagactttctgacagccagaaacattttctaggataattttttttaaagatagagtgtggcctgaactcacagaaatccatctctgcctccttgctgggattaaagatgtgtgccactgccccagaccccaagataaaatctgaaccaaaatctgccagtaggctgacctatggctgcagagtccctggagttgaagagacatcactattgctcaggtcctctaatcttgggaggcttcaagaccctagagttcttcagaaaaaaaaaatgcaaaaactgccaatctacctgggtgccctactgtgtcccacagccaagggaagttctgagaggggcagcctagtcagtattttatccccagaatgctatggcataccaagggccatgagagaagatacaagtgaaatgacaccaaaagcctgccctcttggagtgttgctggtctgagtgtgctgaagagtaaggatttgtgttctagctgaaggcacagtgtctgagcagccagtatgtccttccctccttgtctctcgttagtgcaaagctgctttgggcaacttcatcctcacaacatggccttagctctcttgtccaatttgattgcttgcccatcccacccactgtagctgtttttattattattctttgggggatgtcacacagttcccaaataaatacatggagacttattcttacttatgaatgtctggccttagctgggtttgtttctaaccagcttttctaaattaaattatcctgtttctctttataaacatttttcctcatctttttaacctttatttattctatatatcttttcttactcagtggctgtctgtatggctaggtggctggcccctggcgttctcctctccttcttttctttctcctccatcttttctcttccctcgagaacctagatttctcttcctatttattcactctgcttggcagccctgcctgtccctctctcatgtctagctattggccattcagctctttattagaccaagcaggtagtttagacaaagtaacacagctttaacatatgcaacataaaagaatgcagcacatctttgcatcattaaacaaattttccacagcataaacgaatgtaacacatcttcaactaatatcccacaacaacctacttatgcagaggcatttccaatttcctcaattcataatcatagtcacttattcagaaactcaatggctgaaaagaacacaagctttttgtctcatatgtctaaaggccagatgtcccccgccaggctcattagactaagttcaaggttttgctatggttttatgcctttcaagaatcatgagctaggagtagaggctgtgcctagggagcatcgttccaggaaggaatttacagatcagaacggggaacctaccaacccacagagacctggtaaggaaggaggtcagcaaagaaaggctttgaccttccccccatctgatctgtgcatcattcacctggattccctcactaagaaggtggatgtgttagttagcttacccccattgtcccacatccatagccaagccagagaagcacagtctcggtgcctgtcctggctcccatacaagagatagaaataagtacttgccataactgccagtttacttccgcaccccatcactcagcgaaagcttgctaacattgtcaccttgcctggaggagacttttcacaagaacagcctataaggtcagctgtatggaccgtgagcagagttgaaaggctcagatcatagagaggcacacagaaggcatccagtctacagtctgacaattccctaagcatatttgacccatcagtcatgtctgtctgaaagcgtgaaatccagtcttctgattcttagtgattgcaagacattttttttcttttttcttttaatctgggtactttcaatttgtgtataaaatttctctcttgtagagagtgtattcctggcattttctctttgtaaattcatcttaagttggtgcagtaagactcctatcctcgggcagatcccatatatcctatgtgtgtagactcagattctttattccagagcaaagagggtgcaaaagccaaaggcccatcaaaaacaagcttgggcatacccaatagtgtggggcaagttcttgattaatgattgcttttggagccccagcccactgtggggagtaccacctctgagaaggtagttatgagctgcatttaaaaaaaatatccaagcaagtcataaagaatgagcaagaaagcagcactcttccaaggtctgcttccattcctgcctccaggttcctgccttgagcacctgccctgacctccttccagtcagtcagtgggctagaactgcaagctgaaataaaccctttcctccccaggttgatcttggtcatggtgtttattacagcaataggaacctaactaagacacagctaagagatctttccttcttgaaccacaaccttaaacggaacatacccaggaatgttctcatactttaaatgcttttctacatgaatacatataggcatgtttgctttatttgaagaggacttcgctttggcagtgacacccatgatctgcttgcctgctataggtgtttgtttaaaacttccagcttgctactaaacaagctggatatgtgatacttcacaaaacatcaataaggttaaatcacagattgggtagattaatccctactcagagcagagaattctgagatgatgagttaacacctttccatgcccaactgtatggtggtggtttgaaagaaaatggaccccaaagggaatggcactattaggaagtgtgactttgttgtagtaagtctggtcttattggaggaagtgtgtcactgtggaggtgggctttgaggactcatatatgctcaagccatgcccattgtgacagatcgcttcctattgcctggaagtcaagatgtagggcactcaactacttctccagcaccatgtctgacttcacgacaccatgtcttcctgcaaccactgtgttgcaccatgatgataatggactatacctctgaaaatgtaagcgatccaccacaatgaaatgttttccctttatgagttgccatggtcatggtgtctcttcatagcaatagaaaccctaactaagatgtaccaaataacttctgtagaaacagaccccccccccaaagtcctccatgaaaagaaacatgtgctgcatgcaaccctgaagtgaagagagtttatagggaggggtatgtttgtgcatgaacttggataaatctaaaacccagaatgggagcctctgaaaagatgccagagtgtcagatctgggaagagcaagatctggggagatttccttcactatgtaagtaaaacaaaatcaggtctcctggaagaggatagggtctccaggaacaaagaacaggattgcacagcttgctggtgtctcatcacttggactgaagcctaaccccctatctactatagtccacctaagaataatgaaaaagctcctctcccagtgcctgaaggaagactcctattagggtactgcagcagcaaaattattctcagtgatgacacatggtaataatggaagcaatccatcgcgacaatcagcagctttggaaaaggtcaaaagaaaataagactttttataaatagaattcaacaaaatattaaaagaaatacattcatgtggttcataagccaaaagacttttgggatttcatttttacttaacagcaccaagaaatgcagtagattttgtgggaggggaaagaagctgatgatttaccacacagatacaaagtgaagaagagggggagagagagagaaaaccgtttggagaaaacatctgtcaagatgattttcggggactctgggaacaggtggggagagggcagtcatgatgagagactggagagatgcctctgtggttacaaatcggtactgttcttgcagaggacctgagttgggttcccagaatccaactgaatcaggtggctcacaaccaactgtactccagctccaggacaactattgccttcttctggcctccactagatcctgaattcgtgtgggctctctgtctcttaaaatttttgcttttaatgtgttggagtgtgtgtgcgcacgtgcatgcacgcgcacgggcgtgtgtgtgtgtgtgtgtgtgtgtgtgtgtgtgtgtgtgtgtgtgtgtgtgtgtattgcatgcatgttatgctgatggaggccagaaaagggcattagagcacctggaattagagttacatatagttggaagttgacatgtgggtgctaggaatccaaccaaggtcctccagaagagcaggcagcgcagcaccccttacttgatttttgaaataaataaatttgggaggcagaggcaggtgaatctttgtgagttcgaggccagtctcgtctacatactgagttccaggacagccaggactacatattgagaccatgtctcaaagggaaaagatcaagctctacctgttattggaagcctcatgactattctagttacagtgtagaaaaaagactttaaggtgaggtttctcatttatttttttttgctacttcactaaaacactaactaaaacaaacaagggaggaaaggatctatttagcttacaagtcagtcgtccatcctgtagggaagccaagataggaacttggaggcagagaccacggagcagtgttgctttctggcttgcttcccatggcttgctcaacctgctttcttatacaaacaggaccacctacttaggtatggctcttcccacatgattggcctacaaggcaatcttatggagtgtagggagctgcagaataccgcacccaaaagatggcgccggtttccgccctccgccagcccgacggcgagagctctctgtggtaaacaactcctaatttggtaaaggtcatgtatcctcttaattctgcttggagacaaccaatcctggcgcaccacgtagggttaggtgattggtagatgtagactatatcaggctccgtctccctcgacccggggcgctgccattatacactgtaaagcaaagaggttcccgattaaactgtgttgaagaagattccttggtgtggcgtcgttcttgctggtcaagggtggacgccacaatggaggccttttctcaataaggttccctctttcttgatgatggtagtttatatcaataaaactgaatgttttagaaaggaggcaatcacaatactctagaagctaggacaagggcctataccaaaatgacatttttatttggtgtgtattttgaagatggaatcagcagaaattcttttaaaattgaaggttgaggaaaaaatgggcttcatcaggctccaccaccaccatgtgacatgagacatcatttactaagattgggataaataggtaatgataaagttgtggcacaaggaaagagaatctggagtccttttagagacggcactgattttaagtctctactagatacatgtaagtggaaatgcaagtgtgggaccagacagaaagtgccggagtttggcatttacgtggtttttgtcattactcaatggaaaaaccacaaggcttgttgaaaactgggcagggaagaagtgaagactgaaaagagcagagacgtgaagatcaaaccccgaagcatttcaccattaaggaactgggaaaagctggagaatccaacagttcaggcaaggaagaggcactaatgagataagaataaggccaggaacatgtgatgttctgaaaaataaatatagatggacttcccaaattgtagaggaacaaaacctgtaagtattaagagaaatttgcagctaaaaaccaatattttgtaatttgttctgagattttgaataggatggctatcgtggtgagagctgctttagtggaaggctgggaggttatgaaacgattttgccaaaaagaatgcagttctggaggatcttcgtgtatcattagggaaaacaggttgctttcagagtgctggtcacagtctgtggatctcagagaaaagaggaaatgttctgatacaagtgggataatgggggacacagggtcataatatttaggtagacactctgtagggtatgtattggttacttttctcatccctgtaacagaattcttggaagaggccacctaatgagaaatttattttggttaacagtttcaggacatacagtccttcgtagctgggaaggcatggaagctgaaggagttcagcccatgaggccaaggctggttcacatcctggtgaatcaggaagtagaatgaatggactagatgccagaggatgatccattcccctagccaggtaccacagtctcccaaacagtgtaccagctatggaccatgtgcttaaatatataaaccggtgggagcatttcagatccaaaccacaagatgcaatacacttttgagttagctcatattagacccatccattgtttctaaaaatggagacagagtacatggcatcatgcaacataggctatcaatctggatatagtttctgtaaaattctctttgcttctgcattgcccagaggactaagaatgaggatggtaaagaggccattcaatgtttgcattggaagactagaacagagcaggactagagatgtatcttggttggttcagtgcatggctagcatgtacacagccctgggttcagtctccagaactacagaaacctccggatgctctccttggcctctggtgattccacacatgagtgtgggcatgactatgcagtgcttgtctttctatagctagtttatttcactcaacacaatgatcttcaatttcatctacattgtcacaaataccaagatttcaatcgaatcaaattctgctatgtgattatgacactttttttccttttttattttagaaacaatcttattttacatatcaatcccccaattccctcacccccccatccactcatgcccgtcaccaaccccccctacccactccccagggatagtgaggccttccacaggggatcatcaaagtctgtcacataatttgggggagggcctaggccctctttcgtgtatctgagctgcaatagtatcccaatagggaatgggctcccaaagtccatttgtgcactagggataaacactgtctccactgttagagatcccatagactgccctggcctcctagctggtacccacattcagagggcttggttcagtccaatgctgtttccccagctttacagctaagatctctgtgctctcactaggtcaggtcaactgtttctatgggtttctccagcacagtcttggttcctttactcatccctcctccctctctgcaatggattccaggagtatggctcagtgtttagctatgggtgcctgcttctgcttcgatcagctactggatgaaggctctacgatggcaaccaaggtagtcatcaatctcattataggggaagggcatcaaaggcagcctctccactgctgcctagatttttagttggggtcatccctgtggatccctgaacatttccctgtgccagacctctctctaaacctatactggctccctctatcaaggcatctcctttcttgctctcctctattcctcccctgtctcagtcttcctgatccctcttgttctcctcccccctactcttctccccttacaacaccttttttaaaggagcaaatgttgtatgaagctgcttatatataaaaatgaggggacaggaacaggaggattaggtggggagggagaggaaacactgggagagacatttgaagggtgatatggaaacctaatacagtgtaaacttcctaaaatatttgaagggaatcctaataaagtctccaaagaattcaggagacagagttccaactgaccatctcttgttaccaaatgaatcttccagtaatgggactggattatatccaattaagttgttggccaaagggatcccatggaaatcccccccaaacaaccgggctgctgctaaggcaatgaattgctctccacaaactgacagcaaagtggcatttacctttaatcccaacacttgggaggcagaggcaggtgaatctctgagttccaggctagcctggtctatatagtgagatccagaacagcctgggatacttacacaaagaaaccgtctcaaagaaactttttaatgacttattttattttatgtgcatgagtcttttgcctgtatgtatgtatgtgcatcacatgtgtgcctggggcctgtttgaggccaaaagagggaatcagattcttcagaactggaattacagacatgtgacctacattatcctttaaaatagcacaagctatgaaaacagattgtttaaactctgatttcttttctttttgtctcttctaatgtctttgctgcactagttattctctttaagagtccgaaataagaaagagtttacagaaatccagtttattttttttaaactgttacacgaagacaaaattgtatgtaatagtgaggtgtgatttttttgttttgttttgtttgtttgtttttttttgtttgtttttggtttttcgaggcagggtttctctgtgtagctttggagcctatcctggcactcactctggagaccaggctggcctcgaactcacagagatccgcctgcctctgcctcctgagtgctgggattaaaggcgtgagccaccaacacctggctgagatgtgatgtttttaatatatcattttaaataatgctaaagtaaaatgaagaagatattcaaattcctagactatgtagtagcatttcttccatggaatacggtattgacaatcctggattatcccttaaacaccagagacctttcttctctattcctttatcctctccccagaaaaatagcccttaaacattttgccttgtaatgacattggtcatggtacaatagctcactaggtcatactcaacaggactgttccaaagaacttctgaacctgacatgaaaatatagtacagtctagtttctaaacaacactattattagtcaaatctctgtgttcagcaaacctttatattaaagatgtgtgatgctcagaacagcagaagttggcttgctactacattaaaaatggggcacaaaccatggccaatgttactactgaaggccatgtgaatgggtgtccgtgtcccgtgctgcagcagagggccatggtgatgcttgtggtctgtactgccaccggagacaatgctgaggtctattgcgtgtgctggctctggagaccatgtggatgtctatggtccatgctgtcaccagaaaccatgtggaagtccatgatccctgtaaagggcaaggaagccatgtttgcagtggtatccatgactgcagactcacagggacattagaaagcttctgtgacggccgggcgttggtggctcacgcctttaatcccagcactcgggaggcagaggcaggtggatctctgtgagttcaaggccagcttgctctccagagcgagtgccaggataggctccaaagttacacagagaaaccctgtctcaaaagaaagaaagaaagaaagaaagaaagaaagaaagaaaactctgtgacaactcctaccctcgctcccgcctgccccccaaaaaactagtaacagcctagacagaaaaatcatcaaagagaactctttttttatttaaattagaaacaagcttcttttacatgtcactcagttccctctccctcccctcctcccctgaccccttatcccaacccctttctgctccccagggaggggggaggccttccatgggggatcttcaaagtctgtcatatcatttggaactagatcctccccagtatgtctaggctgagagtatccctctatgtggagagggctcctaaagtccatttgtgtactaggggtacatactgatccactaccagtggccccatagattgtccagacctccaaactgacatcctcattcatagggtctagaacagtcctatgctggtttcccagctatcagtctggggtccatgagcaaccccttgttcagatcagttgtttctgtgggtttctcctgattttgatccttttgctcatcactccttctctgcaactggattccagagttcagctcagtgtttagctgtggatgtctgcttctgcttccatcagctactggatgaaggctctaggatggcatataaggtagtcatcaatctcattataagagaagggcatttaaggtagcctcttgaccattgcttagattgttagttggggtcagccttgtagatctctggacctttccctagtgccagaattctctttaaaactataattgctccctctattatggtatctcttttcttgctctcctctattcttcccctgactagatcttcctgctccctcatgtcctcctctcccatcctcttctccccttctctttcttctaactccctttcccctcccccatgcactcaagaagctagtctccaaagcaccaaacaatccaattaaaaagtggagtacagacctaaatagagaattctcaatagggaaatgcaaattaaaacaactctgagataccatcccacacctgtcagaatggctaaaatcaaaaccaccaatgacagtttatgctggagaggatgtggagaaaggggaatactcctccactgctggtgggagtgccaactggtacagcgactttggaaatcagtatggcgattcctcaggaaaatggcaatcagtctaccacaagatccagcaattccactcttaggcatatacccaaaagatgcacattcatacaacaaggacatctgcttaaccatgttcataacagcattctttgtaatagccagaacatggaagcaacctagatgcccctcaactgaagaatggatagagaaaatgtggtacatttacacaatggagtactactcagcaggaaaaaaaaaaaaccaatggaatcttgaaattggcaggcaaatggatggaactagaagaaaccatcctgagtgaggtaacccagtcacaaaaagacaaaaacaatatgtactcactcatatatggattttagatctagagcaatgaagtagcaacctacaatccacaactccagagaagctaggaaacaaggagggccctaagagaaacatgcatggtccccctccccagaagatctccaaagagaactcttaaaaattgtaataagggtgctgaaggatgtatagttcttcacagttgagagcttctgctggggagtggggatggggaaggacaaattggacattttttctttttctggggtgcgggagtcacaagggtgaggatagacttgggaggacagaaagtatgattaggatgcatgatgtgaaactcctgaataatcaataaaaatattatggaaaataaaataaaataagaggggggcataaaaagaaagatgtgtgcttacatcctaactgctgaaccatctctcctgcagccacctatgggcttgcaccgtaagcttcttattgatcatttccatctgcttagtatgttttgtccatgtgaactgaaatgggtatccaaagggaatatccatttatcgtttcctagccagaacaattacatttctttcccacagcactggttcacattgcagctgaaggaactggataccacgtgtgtgagtgagatgctgatgatactgtggatgctggcagcctttgctgaatcatcttaccatttctaaagcagaattgactcaattagcctcttcctttcctggaagtgcatagcctcccaacccaggacagctgctgacggaaagtctgtgtcatccctgtccccagcacagaagagtattcttctgctctgcaacagcgatttgtctcggaaggacaaaaggatcactctcttttcctatcgatttctggaaataaaaaaactcccccaaactatctatgcatttaaattttttctttattcttcagcatttcatacatattttacttaagatgatccaaaatactccaatttcctcccctatctctatccatagccctgccccatcccaacttaatatcctttttaaaaagatacaactcactaagactacttattgctgcccatatgagcctggggatgcggtaaccctggaattttggctggctctaatcactatttttgactggactgtgagatagtaggcctccaattggttttcttataactcttcctttgggttaaccctcccttccacttcctggtttgccccatacccctacacccctccctgcttgatcctctctgcccaaaccattctacatctctgcttttgctttacttacaatctactgctcctcttccttaatgtgtatgccctctgcccccaactccgttgtagtttcctggcttccacatgtactcaaacttaaacacaaagcaaatgattagaaccaggatcctcacttgagagggagcatgtctctctgggcttgccttgcctcatttagtctcttgcctttccagatccagccatttactgcaaatttcatgatttcagtttcttttacagccaaatgatacgtcattgtatatgtatagctctgttttcttattcatgcatctgttgatagacatccttagccattggaagctgtaaattaaaactgctttaggattccatctcaccacagcaggaatggccataagcaggattacaaatgacaaaaaaaaatggtgtaagaacacatatactgttggtggagtataactagtccagcaactttggaaatcagtttggagatttctcaaaaaactaaacacagaactgccattatgatccagctacactactcctgggcttttatcctactacagagacacacatcagcgtttattgctgctgtgttcacaacagatacgaaatggagctgatctcaatgtctatcaacagatgagcaaaaaaaaaaaaaaaaaaacacagctacatatatacaatggcatattgtgtagttgtaaaaaaagtgaaatcataaaattttcaagtaaatgagtgaatctggaaaggaaagagacaaaatgagccaggggaaggcaagtacagaaatcggttccattttctagctattgtgaacagagcagcaataaagactatgtgacatgcaaaaaaaaaaaaaaaaaatgaatgtccacacataagaaaaagagctagtaataaaatttgcctatgagtggaaccagtatttatccctagtgcacaaatgggttttgggagcccattccctatggagggatactcttccagcctagacacacaggggaggccctaggtcctgccccaaatgatgtgacagactttgattatccccatgggaggcctcaccctccctgaggagtagatggaggtgggttggggggggaatgggagggcaggagggagagggaactgggattgttatgtaaaataagattgcttttaatttaaataaaaattagttttttaaaaaaagagaaaagaatctgcctatgagagggtctaacagactgaacatcaaaggaattccaagattctattacaagtatgatcatgtgcctgtgtgtgcacacatacatagaaacacacacacacacacacacacacacacacacacacacacacacacacacacacaattaagaatgaaataaaatcttgggaatgaaaagacggatcagcagttaaaagcacttactgctcttccagaggacccagtcacaattcccagcatgcacatggtggctcacaatcacctggaagccagtttcaggaaatttgatgccttcttctggcctccagaggcaccgcatgcacagggtacactgaggtcagaagaaagacacagatcctctggaattactgggagttgtgaactatctggcataggaacagtaaccactcttaactgctaagctgtctttttggccccttgatcaaacttatagagcttcttgggttctgtttatgctgagtccatatagagtcagatatggttcctacctcgggtccccagcttccacagacacattttgttttagacaggttctcattatgtaaccctcactgccctagaatgtgatgtgttgcctatgctggccttgaccttgtcgtgaccactgcctctgtctcctgagtgctggggttacaggcatgtaccaccatgagtagctctgggagaacctccatactgcttcccataatggatatattaagttatactcccacaaacagtttacaaagattcactatcctggctgctggtggaaatgtaaatggtgtagccaatgtggaaatcattctggaagttcaccaaaagactaaaaagtctcccacagagaccaggagcggcatgcctaagtgtacagagggaaaaaaaatgaagacatgtattcataaaaagagtgtatatgagtggctgcaataccagtcataacggcagaaggggagattcaaaagtccattgactggaatattatttgacagtataaaggaatgaagtcctggtatgtatgataacatgaataaccccaaaaaacactatgttaagttagggctgtgcatggtgtgttgtctaattccacttacacgaaagacccagaatctccaatctttaggcagacagaaatagatgagtggccattaaggtctggactgggataagggaaagaacaggagtgatagtagatggtgtgtaatttcatttgagatcatgaaaacgtaaaattgatgtagtgatggctgtgtaactgtgagcatgctttaaaatattgacttgtatgtctttacatgggcaaattatgtgcacataaattgtatttcagtgaagctgatagttcttcactaatgactggaacaattgtagcaaccactatcaaagcccaatatctcacatgaaatgtcagtgctgtgtctacgagttcattgtcttcactgtcttgcctatttttcaagttatcccaaaataagtattttcatgatcatttgtataagatgaaaacatttgcttttaatacttttgctatgcttgatgaattttagagcacttattgcaaattattttcaagacagaacaaagattgcttctcagaatctgtatagaacattgttattttaacagcttttattcctgctgttaaagtattttggagaaagtgcaagaatattggcctgtatatccagagacttacttgcaagacaggagtagtggcccctgcctgcagcattcagatggcagaggcaacagattgtcagttcagggccagtttgagctatgtaacaagatcttatcagagagagagagagagagagagagagagagagagagagagagagcaagcagagcgagaatgtgttggactttctaggccaagctctaccctttctgggacagagagaacagaagatattattaattttaagcacatttgtcaaaaatggagccttttgataatttttagttatgataaatcaaattaagatgaaaatatattgaaggaaagctgtgaaatcaagtacccttatattgattattatattgaaaaataagtgcctgtaatcaaaggctggtgaattctcattggtgctccttcactggttcacactgacccgactgtttcctgggtctctttctctcagagtcaagaggagtcagcccagcccagcccagcccagccagaagacaggagctacctactgccttctgaagagagctctcttctaagcactagccttgcagacccacatgtaacttaggaacagatccttgtgtagtctcattaaacgtaagatgctcagaggagaagatccttaaggcatcacccctaactggtactgtatgatctagaaatctagacacagcagcttttccacaaaggcatgtacacgcctttcccctatttctgtttatttcctctgggctccaaatgtctctctctagtgtctacgctctgaaaggttgcaggagatgctgtgatagggtgtgttttctttcctaacatctgttacaattcatacaaagtcttaggaaatatgaaatttctgtacaaatacatataaaaaaaagccccactcctctggctttccagttatggaaacatctgtagtaaggagatgcagccagtttcttccttccctccaaaaatgtatgcattttctgtgcttacccagggccatagttattctgagtgtgactcctctctaacatttaaattaggttttcccaaagtgaggattttgttttggcatcacatttctcttctaagaaatagactttctagaaacttcattcagcattcccaaatacactacttaatttcccctctagttgactttctatttctgggattttctatttgagaacctatttctatcatgacctagtttgttgttttattgcatctcagttctcaggataagattgactgacatgaaatctcaggaatctatgttcataaatctaaaccatactctagatagtacccatatgagggcaatacagagaactaagatgcctaggatacccactgaacatgaagcactttccatatgtcatattgttattgcacaacttcatgtcatttcatctacataatggccctatgaggtaaactgaggctaagctaaacttcttgcccaagataacagtatgaatagataatggagctgggtttcaacataaggctgtcaggttgcctttctgtggccactgctgtcattaaacagtgtggctgctggttctaagcccagagtctgcatacttctgggggctgtaagcaattggcattcctccccatgaactcttcacccccgattctacccacagctcctctctcctttcattcttccaatctttccccgagcccaacctttgacaaaatctagctgcaactgcagggaagcctaggaaactggttgacagatctttcagcaccctactccaggaaatagcatcatagcattgactcttgtcaccctcttggttttgcaaacctctattagtgcaaactgtgtggcaattcagtgttctggggctgagaggcttgaagatgtctcctgacttcaggagaaaggtttttttggaaagacactgggtgactcacgccaatatggaaaacctatagaaagcagtttataaaacagcaggatctgagaactgagaagtgatgcagttgagagtgcagagcacgtctgttcaacggaagtcaccataaccgggtttccttctttagcttttgaaaatttcaaagtccagagcaagagaactaaagtggtcagcctttgagggcagcccctttaccaggaaaagcaatttttcaaaccaatgcaggaattctgccacttaaagatatgaaaatagttcttgggcagaaacaaaccaccaccaccaacaacaaatcgaaactaacaaaccaaaatagccccataggccctctcatctgtttagtctttttccttccacttgagtccatttcatatccctctaggataaagggatccactctcccttgatgggttgcccagagcttggtgagggatcttagacatactgcctaggaaccattttcccttgaacacctcttctaagccccagagcaggaattaaggtttgcatatgaaatgcccccattggttcatgtgtctgaatacttgctaaccaactggcagtactgttttggtaagccaaggaactctggggactcagagatggacactggcaagtgagccactagaagttagccttgaggcctggatcccagccctgctccaggtcccattcccattctctgatactgggatatgagaaaccactgccatccaccaagccataaacactgtggtagtggactaaatctcttgtattgggagcccaaataaactcctcctcccccaaggtgtctttgtcaggtaatttgtcatagcagctgaaaaaataaaaaaaaaaaaaaaagcaacttatacactaggtttctatatacacgttgaagcatgtgttgatttaacttggaacttttggagagaaggagttcaagtttcatttatatgtgaacagagttttaatgaactttgaactatcgaattgttagacccccagaaaactcaggcctccggggtcccagcccaggacctcggtcaccccaatcaccaggcagattcgaaaacctgctgcaaactgcatgaggttttattgttgtttaacgagctaaccccatgttagcttgggtctttcacccacccgccatggcggatggctagcaaagacagctcgagctggctgccgagagatcttgtagggcagcataaggggagtgtctaggggtacacacaggctcaggattggtgtgcctccaggctttgagggcttgccctgtgttgattggccaattggttgttatggtcataggccctcccagggtagttgctatgttctgcatgtcattgttgtgcacttgtccataaagcacatccagtgccgtaaagcatagcaccaccagctaacttctgatttgtttcttgccacgaggcaggcatctgacttctagtgacaggacaaggtcatggcaagcatgtgttactgtcatggctgccgaaatgggaagctggtcccttcagaatctgatgaagatttctatcttctgtggtccctgtggagaatgatctacaacagtcatgcttattgttgttgttgttttgaatgaattagtttattaagtatatagcaagcaggagtaaaagactaaaagtaagcagcaggtttgggagtaaaacctgtaaaaaaaagtaagcctctgtaacaaaacagccagctggagcctctggttaccaaagagagtcctgggcagaaagtcttttcctgggtgagtatttcaattagccactagtagcccaggtgtttttctatctcagcctaaactggagctgagctgttgtttggagaaggtgcctggggatttgtgttctctctctctctctctctctctctctctctctctctctctctctctctctctctctctctcacacacacacacacacacacacacacacacacacacacacacacaattttcttgttccctttaaaccatgctttggggaccagcccatccctgaataaaggctcagggaggacactctaagacaaacatgcttaggtctgaagtgagtgtgtgtagtggtagtgggaggggacaaagctcatctccagagtcagcctcacaatgatctctaacagcacacccattgacagatacagcatgagttacactcagcaaacatgagcaatcagagaccttctgaactcacagcttccccaataagaataaaaagtgatggcgttttcttgttctgtctatacctttctttctctcaagcaatgttttccagcttattttaccctacatggctgagctaatctccatattaaatacccatgactaccatttattatgcctgtttgtttgggagctttatacatgttatttcatttaatttgcaccaaaaccccaataaaattctcaccacaaagatagcacaatccagccaggcagtggtggtgcaggcctttgatcccaatacccaggaggcagaggaaggtggatctttgtgagttcaagggcagcctgggctacagagtgagttccaggacatccagggctacacagagaagccttgtcttgaaaaactaaaaaaaaaaagtgggggaggaggaaaaataatagcacaatccggggtcagcaaaggtaagtggccaatacaaggtgatatatctggttaatactaacattcacatttgagtcagagtcaggaaatggaagaaaggttgcaaagttcacccatggttcttgaaaggtctttgtttcagagagcactttagacagaagtgatgtggtgacataaacagaattagaggagcagggaagctttaacttatgcatttttaggtatatcatattatataatactgacacttgcaataaaaaaaatagtttgaaagttagctccaatgactgaatgcactttttgcttccttccagcctacttccttccttccttccttccctttttccttttttctttctttttatcctttcccttctgttgggggaccaagaaagttccattaaggaatgtcttaaggtccaacctctggtttcagtaaacaggtctgctattgtttaccatagcctctgtgtagaatgcctcctagtttgcatctctacaggactaagcatttgaataggcctgcacctgggcgaggtgtgtgagtaacaagtaaggacacagatagagtttggggtgatctagcaaagaggagtcaactgaaggagacaaaaatggcctcgtggccttggaagcatggttagaaaacagccaggaagatactgaataaagaagagactctagctttgcagcatggaactgagagctctctaaagatgacaagatgcctgtgtttagtctttatcgctgttgggttgctaggagtttccaagtccatgctccccgactcaggcccaacctcatggctgctgtggcctggggctgagacatgccaggccaaaagacccttcttgcattgtttccagtcctgggcttagcagtaagttgattgagcagcaagaggactgcagttcagagctgtagatgtacataaatgccaggtgaatatgaagactcgattgtaattccagcctccgaaagcaaatcgctagggtgagacagccagcaagactcgccaaataaatttctgggttggactgagagactctgtctgaaagtttcaattaaggaagattccagatatcaacctcagtctacacattgaggtacatgcacatataagaacttctggacccgtgtatgtgcatatacatgtaccggcataccacaaacatatgtaaacaggaaaactttgtttacagagccctctgaaaagtcagttgtgttattgaaggcatcttatcttcacaaatttgaggagtctgtgcctaagcgaaagcagctgtgctcatctcccttgcaagagctgcattcctggaacgatgagttcttcatgaggattttgatcaactgtgacaaaggttatttctttgagttcccaaagtatttctcctaaatagcaatgtgaactccctggccttgaagtcccgtagataaagaggaagcctcatgcctctggaagctaaacaggaatttctttaaactttaatatcaaattgtctgttttctattgacaagcttaactgagcagagactaaattccaagacacccagaaacacaggaaccattgcataaaacctcatagcattgttattctgtgtctaaatgaatgcaactgtgctcctctccctcgaaagtgtgaggtgagagtgaggggacacacatggtagcccttctttttccctgattcatcggcttgctctgcttactaggctttctgctggctggctaggttgttccataagtaaagctttttcctaataaatatatcctaatatctttacctggctccggataggtattcactatacaatacattagttgacagtcatagtgttagaccccggaaaactcaggtatccgaggtcccaggccacgttctcggtcaccccaatcaccaggcggattcgagtgcttgctgcaaactgcacgaggctttattgtaatttaacgagctaatcccatgttagctcgggtctttcacccatccgccatggtggatggctcacaaaagatggctcctagggcctcccaagagatcttataggacagcgtaaggggagtgtctaggggtacgcacaggctcacgattggtgtgcctccaggcttggagggcttgccctgtgttgattggtcaactggttgttatggcccataggccctcccagggtggttgctctatactctctacggcattgctgtgcttgtctgtaaagcacacccagggtcgtaaagcatagcgccaacagctaacttctaattggttccttgtcaggaggcaggcatctgactttctagtgtctaggacaaggtcatagaagcacgtgttcagccgttatggctgccaaaagggaagctggtcccttcaataggatgtgtacaggactaacctctgagccaaagtgtcatcatcttcacaagttcagctgtgtcactttcgaaagatcatcataggtgggtgtgtgggtttattgaccgttaatagtccccaaaggaagataggcaggggaaatcttgggactctgacccgagtatccatccacgcctctccaaccggttgtatgcaatctttccaaactgcaacaggaaggggctagaagtatattgattgggagggactagggcaggggctccatcttcagagtcatagggaaattatgatccacgcagggtgcagaccatctagagtggctgcttttaggataccctcactcctgcgcctaacttcttatccattgctctgtaagtaagcctaatacactcattagttcccccagagtggactgtggtggaattgtaccttgggttgtttgagactttttaaggaagggaggtagatgttgtctagtttctcctcaccatagagaaacttacatcagtggctgagcctggctttattgaggcaggcaggggccaggctgttactcttgtaactgtcatctttgaaagggggcatggtggacttcagtttccagccatcttttcttcttatgcagtttcttttcctaaaactattctgtgttcatatctacagctgccttatcagtcaatggctctcaagtctaagtcacaaccccagagtgcgtttcacatatcagtctgacttttgaaatctgactgggacctcttcccagcatctgcacagtattatgccctcaatcattctgcccttctccttgctctagccagtgacatcatcaactgcccaaagaaaaccctaggtagtttctttggcttcttcttttcctttggcattctccaccctccaaacctccacttaatggataaacaaatcgtcctaatttatttttcaagtatttctggaatccacattcctccctctgtcatagaccttcctaaactggtgaatgttcaggagctgaattaaagtgtgccaaactaggagtaacagccaagtcttttgtagtccaccacaataactcaaggaagaggctgaagccagggaagagctgccccccttatttcctcctgtgtaaatacactggtggagtctatccactgtaaaaggagctgcaagtgaaaggatggatgcctggggccaaagatgaataagataagggagaataactgtgggaaatcacttagcattgagtccaagagggaaaagtgcgcttaaggttcagagattaggaaaagccctccaagggatgaggaacacagacctgtgaaagcatggccgactgaatgcaagcctgcaactccagtcttgggtgcctggactgtgtgccatatctgctgtagaaaagacatgctcccttcccccaccacccacccacccaccccacacccaccacaccccgcaccccaccccgcaccccgcaccccacaccccacacccgtgaggcctttctgttgattacctgtggtcaagttcggaagaccacacatgattttgcccagatctagtcctaatcccacctctgcccacctaccctggcccaggacatagtcctctctagcctccggagtgacaagatcctcctcataggtgccctcaagcccatcttcccatcctccaacctcttctttattattagtgtgtgtgagtgtggtgtatgtgtgtggcatgtacacacatgagaagagttgcatgagtctgtacaaacgtgtgcagaggccgaagacggtgttggatcctctgctttattgctctgcaccttattcctttgggacaaggtctccctctgaatcttatgatcatgtttcttcagcgaggctggcagcctgcaagccccagtgattctttccagtctctgcccccttcccgcatcgacactgctggggttgctagtgcatgcagaaccacaccttgtagcaagtctttctctgtaccaccagctcccaagtaatggcacagagacttattattcattatgaaagctcggcctcagcttaggcttttcccactagctcttataacttaaattaactcatttattctaatctacattctgcctccggcctccttacctcatctctccacgctgcccatgccattttccccatctgactggcaacttgtctttcttcctgtctgagccctctctgtgcctgcaagtcccacctaataccttcctgcctagctattaggatcattcagctctttattaaaccaatcatgcaacacatcttcacatagtgtaaagaaatattccacaatatttccccttttttgtttaattacaaagcataggtttcaactctaacataacaaaactacaaatgataagaacaataatcaggtaagaattacatttacaatgtccggtctacttgtatttgacatatttggtgaaaatactctattatctatcttatcttgatgaatttaaagttttatacatgaaccattttctatcataacttgtatcttaaaactatctttttagacatcaaaacatttttttagataaatttaagcttttatatgtatctcaaccttatacattttatatctctttcgtgagtttcttttttgaatttggtaacaaagaaaatgtaactttaactattttgtcttcaagttcatcagagacccaagaaaggtataatattacctaagtacacaggaagttcagtgcaagaaaattccaaaactatgaaatgacagagacatctggctacttggacagtcgcccagggttcctctgcaatgttgaggcgtccatcttcagcctacaggcctagaatatctgacagacttttctgtgaagcaggaattttgaaggactgttccaacttgtcttgacaaagttgggcaattaccttcgtttgcaccttgcttctccaatttggacagtatgctgtcagcagttgaggcaagggcagtgtcttcccttgtgactttgtcacaaatgaaagcaaactccatatggaagttctttgatgtccataatcctcttttggagtaaattggtgctgtcaggaggaggtgtgtctcactgtcatgaaaagccctatggtatttaaacattaaaatgccatattctgtagtctctgaagtatttgaagatcatatctacttaaaatatgtatctgattaaccatgaaaatatacctaacatgactataagtttgattgtaatagatgtctaactactaacctgtattactttattatcctaaatagcattcaaggactagaactttacattacatttttaaatgagctgcataggtacaacaccttaaacaaaaatagacacatatgtacagtataacaaaaataactttaaatttgtataaacatataaaaatccataccaatgtaaactatgcgactagtggttgttcaaaagtagactcaacaatccacccttttatcccaccatttctatactagatcccctttttccatttagaaagagatccctgaatttaatctcctttgtttagttcttttcctgaccatgaccaataataacttgtaaccaacaccccctaaatgatgacaaacacccataacccaccgaatgaccaaaaatcacccatcccacctcttaggaatgtgggcattgtgttctctagattgcttcctgttatcttggggcgatggtgtctttatgagaccctgagataatggtcaagtcctgggagagctagctgtatcattggttgtctagttcctgtgtaattggaaagtgtagggtttatctgaagtcctggaaacagtaacctgtcaggctggaccacctcagctagtagctttgaagatgttctaaatgcagaattttgagaggaaactgcaacaaaggcattctgagagtctggatcacttgggctacttgtctttattggtatccggcacaaatatgatttaatgtaagagcttatcgtgtccatatcattaagaacccctaataggaatagactttaactcaaatggttaaaatgaaaagctttgacaatgggtctaattagaaaggtgtgggcaggattaaggagatggaaataagtgaggttgtgttcatctgtaggcccaaaggggcaagaaatagttattcagagggagctggagccacagaggggcatctgacaggacctgtggtcacggtagggtaaatccacagtgacagagccatgcccaagccatgggcagcccagggactgggcccagcgggaagccagtaggcaggacacgggaattaaggatccagtggggaatcctcattccaggcaggaacagcaatgcattctgaaactagtgaaaagcaagcagctctcctgcttgagagtagcatttttcagataaaggttggagaagttaaggtccaacagccaggaagaaaaaggtctgacattagaccaggtagtttaacctgagagctcgcaccttgaactgtcactagtgaatggcgtagaatctggtttgcccccagtccattgtacatagagtagcatgctactgttaaaaagaactgtttaaattgctgtgtctagaagtagatgtttgagtctcaatatgcttcatctgggcattgttattttctttgtttgtcttttcagcatatgctctccaaagtcggaatgtgggactttgacattttcttgtttgatcgcttgacaaatggtaagttacctcccggagaattctcactaaaatacacaccataaagtagattcatttcattagaaacaaattgtatttttagacaaactactttttccttcttttgtcactctcataaatctatagtcagtcaagacagactagggaggggaaaattaattcagatgaagaatgaggactgaatttgaccttagcgtgttaggacggtttccttctgacctgtgatcccaaaagaattaggaaagcactgattgcattccttcctctcagctactgtggccatgtccaaatgtagagagttcattgctagtcagtggcaagtgaacacacaaaagcacacctgactagtcctaacccttacggacaaggtgcttatacagcttcttaagcaaactgagtctgcccgttgccggcatttctcaaataagtttggcattgtcaggaggaagcaaatgctagggaaagaggcagattcaggtggatctctgtgagttcaaggccagcctggtctacatagtgagttccaggacagccagagctacatagggaaaacctgtcttgaaaaacaaaaacaaacaaacaaaaaaccctaaccatctaaagacacaaaaggggtgggtggatcttggttccacctaggaacaagttctaccactcatgaatggacaaagattaagaaaatttactgaccccaatgcgacagaaatacaggagtttctgtatccaaacaacatccaaggtgctatggggtacatagaacaccgggattatatattcttaaggtcacaactgtatagtcagatgcaaagaggggtcttgtgtgcctgaccttgtgtgtctcctggtatactcccttttccttccagttttgtttttatatgtatgagtgttttgtccacatgaatgtctatgcaccacttacgggcctggtcctgccgaggccagaggaaggtgtcagataccttagaaccagagttatacagggttgtgagctgccatttgggtactgctctaaaagaacagccagtgctcttaagctccgagccatttctccagtccctctactgatgcacctttaaggtaaacagtcccaggccctagggtataaatgtgaggttacagaggatgttgaaataacacctgattttcttcccttgataactatttttttctctttgcagctcctctggcaggaaaggaaaggcaatacaacaaggcatgggtcagctccatggtttgggaaatcatgaaattgctttggtactgacagattatctgatgggcttcaattagaccaactcagaaccaagttaggtaaaaaattaatcttctaccattttgattctcggaactgctacagctataaccgcaagttgcctagcttgttcctggagactgtcagtgaccagttggctatgaacctatgggtattaacacttgcctgcacccattactgtaggtttccaccttcttaaacctcaccctttgttctcctcttcagagcaatcttgtggttttaagcaaatctgtctaccaaatcacaccccctagagccctcatataaagttcttttgtactctccagctttgatattgaccagggatattgattagattaagttcaaacttttaaagatcgaaaagctacatgttcacatggttaaaatagaaacttatgtggtgggaaacagattaaattttagttggggaagtcccatccatggaaaggtcacttgcatggaagggaaggttcacaaatactactgtgttcatccccagtatcctttgattttgctatcttgtatctgagtgtttttttataacatgctgtgggcttttcccagcagcactgggcagtccttgtctgtaacttatctaccttctaccttcagcagtttctagggccctaagtagttttgtcatgtgaacagcagctggggcacaggaggaggagggagaggaggaggagaagaaggaggaggcccacttggcacctgcatcttgtcttgcctttgttaacctgtcatgggcatgctacatggaggatggggtagacacaccttttttaaaaatttaattattttatatttgtagatgtttttcagcatgtatgtctatgcattgtgtgtgggcagtgcccagagaaaccaggcaagggtgttagaccttctgagaatggagttacagacagttgtggctgccaagtatgtgctgggaactgaactcctgtcctttggaggaacatcaagtgctattaactgttgagccagctctccagctcctagacacacatcctttcagatgcaaaatggacagaggtggaaaggagttagcctccatgacatgaggagacatgagacctgtgggagctgagtttgggggaatgccaagagtctgcctggacatttctcttcttgcaactttgaggatgcatgactatcttggaatgtgtctgtggcaaatgttagggtttgttcatgttaactgttttcaatcatggtacaagttaattaacttactcataagcaatatatcatttctttctcaccttgttcatatgaaagtggtgtttttaagttctgcatttgcaatcggtctgttttgactggcaaatcacattcttgttcttcaaaaatgattgcctgtgacttggaatctgaacagagcctaaaggagccatgactcaaaaaatgttcccttcacagctctccaaaattaacaggagtccaactggaatgatccttccagaaactgacttcaaccaagttcctgtgagtgtagaaagcacgcagaaaaggaagtgggtaacttttcccatcttttcactcttccctgcaggtagaaagatctacttccattatcataagtttgaggatccttggttttagatgaagagattgtgaaagatgtttaggaaataaactgacatgtcatagaccgtgtgaccaaatccagctattgtaaaaggaagttggaagaggtttgtgtttcttgaggctttttagtgatttaagaaccaattttataattgcttctatccctgtgttcttgtcttagtatttttatattagcacattattactgtgatatcacatctttgatgtgttagctatatttttccctccatgcactggcataaagttgtgcacattataatttgaggggaggattgagagagtcccataaaactcaggttggcctcaaccgctcatgcagtggagactgacactgaattccttatccttttgccttcacgtcctaagtgctgtgattgcaggcatttgctactatgcctgggaaacgcaatcttaaatggttatctctatacccggataggctgtatggagcacactttgggaaactagcttacaggcttcatgaggatccttccagctttaatattccagcaggttgacccttgtcaagcagagagctggtatcagacaactaggtatgggtttttttttcgtttccctctggttctcacatgcattggctgcataaactgggcaagtcatttgaaacctcttacctacattagcttttccctatgagtcaatgagacaataaatgccaagtgtttactaagtgcttagccctacagcacgggtttgagtcaaccattattatcaatgccagaatcacaggtaaaacaatacaagcaggactttgctgcagggcaccgaagttctggagatatcacagttttacagctactgaatacgcacatacttgacttgctggcacttttagttaatggtgtctggctttctctgagcctaatgcaagtccccttaacatcaggagaacttcaacagagactctgggtaaaagagagatactctagttccagtgattttgtttagagacaccatgttagtcttaaactcacaatctccctggctcaacttctcaacaggctggaatttcagaccaccacaccctctttaggtgcccttttaggtgtgatggaaccatttcctccccacaacatgcaaatcacaccactgattcgaagggaatttgtttccgtttgctcttaaacgagctagggctagttctcatgaagggtgggcatggaagttgaggtgagtgtgagcaggaaattattttcctgtgggaatgtttctagaattcatgagaacagccctgcattgacgtaagtgactttatgaaaaatgactgtctgaatacttgaatttttcatggctggtcctgatagcattatatgaagtcagggctgtcattaaccctctgtcacagatgagaaaatagagccagagaaaatgaactaacccgaagctgtgagactattaagtggccaagtgacgactccaaaccagatgttttggcttagaaaaaacgtgctcttaccataccaaacccaatgtctcaacatttgcctttttatgatgtaacctccttagccccacttaaaatcagcccctagtcagtccagcccctattcaaagaaataacaacacgatgatcaaaggtagactgggaagctcacctcagctacctgcatactgtgtgtgtgtatgactctgtgagtgagttacctgttcctttgcttccctgcatatgaagtggaaatggtcacaatggatatttcatggggctcttgtggatattaaataaagggctggggactcataataaacacattgtaactgttgactatacttcgtttctcccttcatgattgcatagaaatttatcatatttatcagtttatcatgaaatcctttaaatttagacccttctatggtttgcataaagtgtcatgacctgcaattttggagaggttccttccttggagctcctggaggtcctagcagagtgatctcacagtttctccctaggctgtgcagcctgtgctcctggcaaagaacaaatgtggctcatattttagggaattctttcttgagtcttttctctacaacctagatagagcctttctcctcactcaaacctttgttcttcttttcattttggagagttttcttttctatctttttttttgggggggtgtttgtttatttttaaatatattctttcctcctcatcaaagttagtttggacaggaaatttgccgtggctttctgaacttctacaatgtcatgctcattatttctcttcagctgtattcttaccaagacttaccaagacagaactttaaaaccctcctgtttcagaaatactgagatcataaggaagccttgcaaatcatttctataaagatcacagaaaatatatcatgcccagaagggagatatttatttctttttgtaatatgtgaaacaggaaaataattttcaaaattttggttggggggggtgaaaggttcaggcattatgctggcctgtccctgttacctggcagaatccactcagacagtaccctggtcagcccagggttccctaggaactaagtctgcacacaggtgtaaaggacccctttaaaagacagactcctgcccacttaggctctcttctcttacttactctctcttgccttccctctctctctgctttcttactctctctctcctctcttctgttctccccctcccccacctgaaataaactatggttaatgtactctagttcgagttccatcgcgtgggtttccatcttgagttttctttttctaatttttaaacttttacaaaataacaacagtgggggcacaggtattttgagacagggcttctttgtgtagctttggctgtccttgaaccagtagctggggtctgtgttaatatccacagcctgtgttgcaacaaagggcctcatgaacacctgtagtctgggcagccacctaagaccaagttagtgtctgagagccttgctgctgctggggccatacagatctcagaggcctacactgacatcctgggccatggtattatctggacctgggctactgctaaggccatgtctgtgttaatgtccatggctcatgttaccactgaggacagtgaggctcaggctgtggagttggctccacctcttactggctgcagctctgaggagaacctgtcctgtccctaacttgggagagcaggccctgcacctagcctgagcagcacagtagagataatcccattggcaggggtgcgggtgagcctgccagagtgtaggagagtgacagagctagccccattatctgtctgtcatgggttggtgtgggcaagggagagatgaccccccatgaccctcaacacctactgccagtggtacggctagtcccagggtcaccagagtttctctataaacagagtttctgttccgtctagtctggccactcctcagtcccaaataaacacacagaggcttatattaattataaactgtttggctgatggcttaggcttcttactggctagctcgctcttaattattaacccataactattaatctatgtatttctacatggcattatcttactggagaatgcctggtgttctatcttcccagtagctacaagacatctcctggcagctcctctctaccgtcctcttcccagcattctctagtctggtagccccacctatacttcctgcctggctactggccaatctgtgtttcattcgtcaacctataaaagaagcataaatacagaaggacagcctctatcatttcttattgactgcagcacacgggagagtgggccctgcaccttgcctgggcagcacactagagctggccctgttggcaggggcgctgttgagcagaccctgaggtagagagaacaggagagttggcctcactccttactacctacttgctgtgaatgagctagccaaggcaggggtggaaaactcaccctggtggtaacaaagaggcaaagttggcaggatgaccaccaacccagctaccacccaggccccgaaccagggctatgaattagcccaccccaatgtccaactcatttatgaactgctagagcatgtgaaggggtcagacctacagatccaaagctgcagaatgtccatgacacaaggcaacagcaggatatccaagaggagcccagtgagggcccagtatgaagagtgtagcagaaggcggaagccttgaaccagacaaatgtcttgttagaaccctggaaaacctcaggcctccgaggtcccagcccaggaccgcagtcaccaggcagattcgagagcttgctgcaaactacacgaggctttattattattatttttttaacgagctaaccccatgttagctcgggtctttcacccacccgtcatggcggatggctacaaaagacaccttgaaccagctgccgagcgatcttgtagggcagcataaggggagtgtctaggggtatgcacaggctcaggattggtgtgcctccaggcttggagggcttgccctgtgttgattggccaattggttgttatggcccatagccactcccagggtggttgctatgctctgcatgtcattgctgtgcgcttgtccgtaaagtacacccagagcagtaaagcatagagccaccagctaacttcttattggctccttgccacaaggcaggcatctgacctcttagtgaccaggcaaggtcatagcgagcatgtgttactgtcatggctgccgaaatggggggctggtccctccagtctcattgtaatgaacacttacaggaaaagatgtatgaactaaaaggtacattgtatgactcactgtgccacactacagcttcaatgcccagactttttgtttgtttgtctgtttttagtttttctttaaaattttattttattttattttggggcaattgcaagggcagagggcactataaagggataggtagacaaacgggattggaatgcatgatgtgaaagtcacaaagaatcaataaaaatgcagcaagtatactgatacataccagcaatctcagtactcatcctggaggtggcagcaggagcaccagaattcatggacagcctcaagtacaaaaggctagcctcagctacatagagttcaaggccagtcaactacctgagacttggtcttaaaaatacattgaagtactacttatgtactctgagccatgttacataaatttattttacctttttttttttttttaaatacagggtctctctatatatccctagttatcctggaacttgctacttagaccaggctggccttgaactctcagagatcagtctattctgctacctcagtgctggtattaaagcatgcaccaccatgccaaaccccatattttacttttaaggtttgtttcttattttatgtgtgtgagcttttgcgtgcatgtatcacttctgtacctagttccagaaaaggccagaagaaagtgtcagatcccttggaactagagttaaaaatgttgtaagatatctttatggtgaacccaaccagggccctctctctaaccccagacatttatttgttaaaataccatatctcttttaagactcagttccaaaatctttcaggattcagatattttgttttactttaaaaaaatttaaactttgtgtgtgtgtgtgtgtgtgtgtgtgtgtgtgtgtgtgtgtgtgtgtactcaagcgcactgtctcatatgtagagatcagggaacaacttgaaggatttggtcctctgctccaacaatgtagatcctgggacccaaactcaggtttccatgcttgatagtaagtgcctttacctgctaagccatcttgtagactcctgaatgggtattttaaagattctgtcagggaatagtgaagatggaggtttctgtttcaccaggtcctgccacccttcagccccaaataaaaacatggacgctctattaatttataaactgttggctgatggctagggattcttatttattagctctgccttaattatttacccatttctattaatctatgtattgccatgaggctgtggcttacccataatccggcatgttactcctttggtggcatggcatctcttggactccctccccagaattctcctcctctcctaaccccacctattttcctgcctctacgggccaatcagtgtttttttctccgaccaacaagagaaatatatacagaagaacatcccccatcagaatagtctcaagggaggacatttagtactatcttcttgtaattaggtttttgttttgttttgttttttgaaaaacaaaatttttttgtttaacagccctagctgtcctggaacatgctttatagtccaggctgaccccaaactcaaatttactttgtagaccaaactggtcttgaacttatgatcctcttgctgcaacttctcaagttctaggattacagattcatagctctatgcctggataagacatgaactaattaatatgaaattttgtatgtgttcatgtctatgtatacacctaaaggtgtatattgaatggtgtccatctaaaaggtatctttgggtgttttgttttgttttttactttatttttaaagtctacatttttaaataaactacagtcggaaatttttgttccaaggatctttctatggaacatgaatgtataaattataaatatgtatataattattaaagacaggaccaaaactacatccacaattccttaacttcttacctaagcaaagaccgccctggattttgccaaaaagtttttgctggaatgcagtaatagtgaaattccaccacaattcatgttcctacaggtctttcttcaccctgagtcatgactgtaacagaagtgtaaatggcactgtcagctcttcagttatgaagtgtcctggaaccagcaccccggctgacattcagttattcaaaagctgtctcacacagcaggctatgtcttcaactctcctcacttaacattagtcaattgatacttgtgctgagggttttcgattctttttaaaaaattttaattgattttttttgtgtgtgtgttggttcttcttgactctcaacttgagggaactgaggtatgcttaagagattagtaatacgaacaccagggtgtgcctggaaggatgtttccagaaaatattgagtaagtgaggagtgatctaccctaagaatgagcaactccatcaacaggtggagggcctggcagggaataaaagaggactaagggggatggcacagtgtgcaagccttctgtctctacttcctggctgacataagatgagctccattatgccccctccccaccatgagacctctaaaaccataatcccaaataaatctttcttctaagttgtttacatcaggtataatttataacagcatcagaaagctaacacaattttaactaacacataaaagcacaaaaaaatgtacacatttatgggataccatgtaatatttagacattacatgccttggaatactcaaatccagttacacacatcaatctgctcaaacatctattatttcttttttaaagtatttatttgtttatatgtatggatgtgatatttgcatgaatgtatgtatcacatgcatgccatggggaggtgcttggggaggccagagaagggcattggattgatgggggaattgcttctgtgtttgtcttattggatgataaataaagtactgtttggccaatgaggaagcaagataggtgggactaggagtcaaggaggattctgggaaatgtagtaaaaagaagtcttgttatacaggcaggaagtgacatagtaggcagactcatataagcaagggcaagaagaaagtcatttccttttctcttttcctcctgctctctgctctgcagttgctatgtgaccctggaagaggacgccagtggaaggtgtcccccataagataagtcttatgattatggatgataattaagtctgcgctagcaagtaagaaatcctagggattggccagcagcattgtacctaatataaatctctgtgtgttacttgggaccttaacatggtggtgggcagaactcaggcggcctggcagaaagcacccacatggtggcagggcttgggtggcttggtggaaagtcttattgcaacattggatccttggaactagagttatgaatggctgtaagcctccatgtaagtgatgggaattgaacctgggccctctgaaagtgcaagcagtactcttaaaaccactgagccatctctccaaccctagtatttctttacagcaaaaagcaaaaacaaacaaacaagacaaacgccttttaaaattcttccttctatctcttcagggtagaaagaacattgttgttgtctatagttgccatagtgtgcaataacagtgcagaactttttattctaaactgtaactccattcccatccatcaaccatttcctctcctttccccaagttctcagttcttttgaggttgagaattcaagatgctttgagttgagtttttttcaatgaaagtgttagaaacatcttctgggctcatgtatcaagtctgaagctagttgtactactttgggaaattctgaaaacttagaaatttgggcctggttacagtaagcagatcactggatgtgcctctaaagtgtatcttttttttatataactaatataagcaactgtgtatttatttgggactaaggggtaaaggcagtactaaaactttcatcttcagggtgtattctgactttctttttttttcctcctccattttcttatttgaattagaaacaagattgttttacatgtcaatcctagttccctctgcctcccctcctccctccccccccccccccaactaacaccctacctatcccataccctttctgctccccagggagggtgaggccttccatggagggggtcttcagagtctgtcatatcctttgggatagggcctaggccctcccccatgtgtctaggctgagggaatatccctctatgtgaaatgggctcccaaagtccattcctatgctaggaataagtactgatctactacaaaaggccccatagaattcgtaggtcttctcactgacacccacatttattgggtctggatcagtcccatgctggtttcccagctatcagtcagggaaccaagagctcccccttgttcaggtcagctgtttctgtgggtttccccagcctggtcttaactcctttgcttatcactcctcctctgcaactggattccagttcagttcagtgtttagctgtgggtgtcttcttccactttcaccagctgctggatgaaggctatatgatggcatataagtcaatcatcaatctcattatcaggggtgggctgatggggaatgtactgtgtatgtttatcttattgattgttaaataaaatactgtttggccaatgagacagcaagttagacaggactaggagtcaaagaggattctgaatgtagtagagaagtggtgatccaggcaggaagtgacataacaaggagactcctatttaagcgaaggagaaacaggaagggtcccttttcccctctgctcctgctccagtggcacaatgtgatccaccggcaaggagggacaccaataaggtgtctgataagataagtcttataaaatatataggtttatgatagttaagactgagctaacagatgagaatcctagtcattggccaagcagctttaaacctaatacaagtttctgtgtattcatttgggccctaactcagccgggtggctggcataaagctcacacgtggcggtggagctcaggcggcttttggcagaaagatttattgtaacagtgggcatttaaggtaacctctcctctgttgcttagattgctagtttgtgtcatcgttgtagatctacagacatttccctagcacctgatttctctttaaacctataatggctccctgtattatggtatctcttatcttgctctcctctattcttcccccaactcaaattccctgctccttcatgtccttctgaagtgtatcttattcctggccccttctggtgtctgtctctctttcctgtttgtcatgagatgagcatcctctatcacatgctcctcagccatattcttcctcacctcaggccccaaacaatagatccatccaactttgagctgaaacagaaagaaaacatttcccttttaagctgtttctggtaatccgtttcaataatgaagatgtaacacgggactctaaactttcaatccacacattggtgttatgatgtttggtcttgactgctcatttgattgattgagacatgccctaggaattagtaaaacacactttagtgggttcatgagagcatttccagcatggactctccaaggagggaaggcccagccttgttgtggaataatcttttgacactgtgaagatgtgtcactaggattggtttaataaaaggctaaatggccaacagctagaaagcattttcggggcagagagaatgctggaaagaagaaggcagagtcaccagatggagaggggcaaatgccacgaatcacgtggcaatagaaatgggctaatttaaagttataagagctagtggggcaagtctaagctatagacggagctttcataattaatcagaagtctctgtgccattatttggaaggtggatggtgggacggagaaagactatatacacccagaatgcaggtggccccatcaagtgaaccaagagcatagccaatcaggcagacattatctctctctttctttctgctttctggctgccatgatgttctttcctcgccataggcaagagcaatgggaccaagtgaaacagacagaaacatctgaaagtgtgaaccaaaataagccccaccccaagctgttttctcttgtatatatcacagtgacaaaagcaaacttctaacacagacctactaagaagcatgtctcctagctgatctcagatccaacaacattggcaaccaagacagacagtctcaccatgtattaactaatctctaaccacatctctgatttacaatatttcttctcattctgtggattgcctttttagtttgttgttgtgacctttttatgcacaaaatttaatttttttagcagtctgatttgttgggttttggtgtggttgtggtggtgtggtgtgtgtgtgtgtgtgtgtgtgtgtgtgtgtgtgtgtgtgttggtgtaataaaaaatattgccaaattccatttcattatacattctcccaagtattttaatacagaggtttttgttttgttttgttttgttctttttcttttttgttctttcaagacaggatctctttttgtagctctggctgtcctggaactggctctgtagaccaggctacccttgaactcaaatatctgcctgcctctgcctcccgactgctgggattaaaaggcatgaaccaccattgcctgacatataaaggttttattgttttggagtttatatatctgatccattttagctaaattttatgcatagtaaagtaagattccaacctcatgcttttccatgtatgctcttcggcacacttgaactgttggtggcatgattacccttgtaaagaattgtctgatcaagcatgtaagggtttgcagttgcatttggtgaagaagtggagtttggaggatgttcttccaagtctggggaaggagaggcagcacaaaaacaaacatttacagtgaccgagtagtcagactgaaagggccaagggccattaggagacagtcaactttaggagtcaggaacaatccaatcattcacctttatgactcagttgaagtttgccaattcctaccaacactgagaagttaaaaaataaatatggtataaccccagaattcaaaattcaggtctaattcaagattaaattggcctagatagaaaatgtattttaaaaaagtaagttgtttgtgacttcatggtagataatcaagggggttactgtgccttggttgaaccatctgagtagtaggcatgatagtaactacctaccccacaagattgttcaggaatcaaatgaactgatatttagaaaatatttcgttgatgcctggcaattattcacttagtcttactactcattctgaatcattcaagctagtatcttaaagcccaacaccttgtaggcctcactcttggctagtagatgagtcacttgtcatggtatctcaaattcacaccattgatatgatcaaagagcattaacacctcagctgaccttgtagaaatttttttaagatttagtttttaactgagccatactcctggaatctagttgcagagagggaggaggaataagaaaaggagccaagactgtgctggagaaacctacagaaacagttgacctgacctagtgagagcatggataccctagttgtaaagggtatccaggagccagcattgtactgaaccaagccctctgaatgtgggtgccagctaggaggccaagacactctacgggacctctgacagtggagtcagtgtttatccctagagcacaaatggacttttggagcccattccctatggagggatattattgaagcccagatataagaaagagggcctaggccctcccccaaatgatgtgatggactttgatgatcccccatggagggcctcaatatccttggggagtgaatgggggtgggttggggggtcgtggggagcatggaaggatgggagggcaagggattggggcattgatatgtaactaagagtgcttataaaataaaaaaatatttagttattattgtttctaattacatgtgtgagtgtgtttatgtgtgagaaagcacagcacctaagacaagacaactgatctctcctcttccctgagctaggattacatgtgattgtgaactgccagatgtgggtgctaggaatcaaactcgggtcctctgaaaaagcaatatgtactctcaaccactgagcaatctctccttccaccatgcaggtcccagccattgacctcaggtgtcagcctgggtcaccaagagctttcacttgctgagccatctcaccagtcctaatcatgcctttaaaaacactgctcatgggctggagggatggctccatcattaaagactagactcacacacacacacacacaaaaaaaaaaccaaccaaccaaccaatcaaacaaacaaaaaacactgctcatgatatcatgagtttgatgttttgaaaatgtgcataacaagttgatcagaattagcattaaaaatttaattgtggaaacacctaagtttgtttcatatcacagccacccagaatgcatagattctctgaaagaatccaaattctttgctgaagtagtaagcccttcgactaagatcccttggaaatggctgcggagtttttctagttagggtgagatgagatgctgtctcaaaagcctctttgtttggaaaatcacctccttttagcaacactattaaatagattcccagaaaaaacaaacaaacaaaaaacctactcaattccaaactctaggtattgtggggtatccaacagagaagacagctccgacatgggtttaagccaacagaaagtctttgttagccagctggcaactacagtggattttcaggatcccagtataaccctgaggctttctcagggtgagtttttaagcataaaaactcttttttggattgacatagttcagtcaacaagaacagttagccagaaacagggttacagaagccaaaaagcaaggttagcacatttagagactttcctagaactatggactttgaaggattaagcctttgttttcatttttgacaggctgtgctgtctccatgctgagttttacagcccaagtgggacatcatggagtcattgtgctaaggtctggggctggttacattggagaatttagttgatctgtttgattcaacatagttatggaaatcatgtcataaattgcttgctaagagaacggtaagaagcgctctaagaaaaatacctgggcaagtcattggctttcccactgtgtagacaatttaaaaagctggatcttttaacagctcttttgttgtttgttcagagatagatgctcaagtctctccccagctttaaggtccaactttaccatgcaatattgtttcaagtcccttcattactctgacggttaattttgaggcacactcattaaagtagtcaagatgttgggtaatagcttcagattgtctctgtgtggtagaacatgcctttaatcctagtacttgggaggcaaaagaggatggccctctgtgagtttgagaccagcgtggtctgtggtctgtataaaggtttccaggacacccaggtctatatagtgagaaccccatctcaaatacataaataaatacataaataaataaataaataaataaataaataaataaataaagctttagcccaatagaaaagccactgtactctcctctatggaggtagagtgacatagttttggccagaggtagaaggaataattccagatgaatccatattttggtggttgttactgataaccagagttgtatagtttattattgctgcctacctacaattgctcattgtttatcactgtttatactgaaacaggaggggccctctagcttcatttacttttaatggcttttaaatattactcatttggattaacagagctgagcaatatattattcacccccctctggtttttctagggatggtatttccatctgaagctcccaaaaggattaaatattttccctggccaaaggtatatcatgtactgtgcaaccccgatctgtattttaaatggcagggttaggtatctgtttccaaacaaggcataagtcatacatgttactctgtgatgtttctttagatttttagatcccagcacatgaggcatcttcagacattagaatgttgccaaggacttgctaatcaggttatgtaattaaaagtacaatgatttgtgacttccagggaaatgatgtatttgctttaaaagaaaattccagatactagcccaggagatgaaaaccatttattaataaaaaaaaatgttcaaaggggacaaagagacaaagagccagcagttaagagtgcttgttgcttttgcagatgtctagagtttggatcccagcacccacattgggcagctcacaactgactgaactccagccccagaggatctgaggtcctcctctgcactcctccagtacctgcactcattcgtacacacccacatacagacacatagacacacacacacacacacacacacacacacacacacagagagagagagagacagagagagagagagagcacacacaatataaaagcaaatctttaaaataaaagatgttctagtaaattaaaatgtcccaagtaacagagatggctacaagcctgaatttgtgtgctcagcctataaatcttgtgcctgttgcccccaaattccttttcatgtaattaaagttctttgtatgcattcttgggttcccaaagatcagcttctgctgttgaggccaggccttgaataaaacttaatctctgagctagagagacagttcagcagttaagatggagtactgatcttacagaaaacccaagctcacttcccagcatccacatcaggaagttcaaaaccacctgtaacttcagatccaagggcgtccgacacctctggcctccacagattcctgcactcacatgtgtgtgcgcgcacacacatccacacacaggaacatgattaaaaataaaataaaaatttcaaaacttgatttccttcttgctaactctcagtccgtggatattggcttttcagcagtgaacaactggactctggttcagtaaaggaatcaactgttcccaacaactacttctttccgactggctcaggccaaagataatgttctcactagccttgaacaaaatgtgaaaaatgaaaacaatgtcagattaatgcaggagtggaaactggcagtggttccctcggggacagcattaacctttattatgtgatgtgttccttctacttgattagtgaacgggagggttttgatcctgtgtacaacctgctaaacctaactacaataaaactatatttatgtgatatccagaacaaaggcaattatagagattattcagcaggtcattagcagtatgtgtttattatttcgatggaaaccattacgaactctggagagaatcctaaagaattacagatttcttcctttaacatggtcaaaaagtacccacaagtggcctcacctgtttcaggactcaagactccttaatgatgaggagagctctggccttacatagagttgtcaagaaaagagaattagggccaggcaatgtactcatctggtagagcagggttttttgtttgtttgtttgttttgtaatatatacaaagccttgggctcaatctcccacactggattaactggatgtagtaacatatacctgtaatcccagaatttagaaggtggagatagaagttcaaggtcatccgcagtttcttatcaagttcacaaccagcctgataagcaagatgaccctgtctaaataaaaggaagattgcccagaaggtaaaggtatttgccagcaaagctgaggacgtgagttcaatatcctggacccacaaggtagaaggagagaacaaactcccaaatgctgtcctctgacctccatatatggccccaaacacaaattttagaagtgatgttaaaactaaatagaaaaagaatgccaaagaaattaattggtgggccttttcaaagcaaacttttcacggggaaaaaaatacatagcgtatagctttcacctctgacttcagagaagcccagctgtaccttattcctccaggttcctagcatccaacagtccctgataaagtaatagcaatcttgagtctttcacatcacccatatctgacaatggtatccatgtctatcgccttaaagtctgctccttccccctgaatatctcagatgtccctgtgatccagtcctaccctctgccatctttggtatctggatatctttggtatctcccatctgcatcccttttctgagatttctatttctcaatactctctcccaattcattcactagtttgtctaacatacactggatatcttccttgtccctgcatttccctaggttctgaagacaaagacgaatagtttggattctttcaaaagaaaatgtgtgtaccaatgtttgcacacacatgccatggcattgtgtggaggtcggagggcaagtaagtagtcagttccccatttgagggatctagggatcaaactcaggatgccgggttgtctagtgggtgattttacccaccgagtcagtgcttgacttggtgaaatcaggaaagcagtatatatgaaccactattactgctgcattcttattatttaagctaaggcccacacttctggtactccatggtgttgcttctgctcaaactcaacagtaccattttgtcacagaccaaagagaaaagagcagtggtgagttagtctagatgctctaaaggaaggccggaagtgccttacaatgttcagacaagttcactaagtctgtgctccccactgctctcacaaaaatggcccccagagcactggctcttatacttgtgttctaagggaagtgtcctcagctctcaatcaagtccctcaggggtgtgtaccagggtaccggtgtagatggaatttagacaaataaagtgcaaaccacacaggacttcacaagatactaagagtgtttggaaaaggaaaagaaaaaaaagagtatttggtcagataatatattttaatgatttaattaattaaaatttttattattattttcatacaacatattttgatcattttctttctcctctcccaaatcctccccacccaacttcatgctcaagtgtacacatgcatgttctctttctttttctctctaaaaaagcataaaaagaaaaccaaaaatgaaaatcacaatgaactaaatctaaaaacaataacaaaacatatcaaaacaaaacaaaaaattcatgcacagacacacaaacatagatctgttttgtgttggccaactactggggcctaacagaacctgctttagagtgtggttgatatacccagtgataccaagtgaatattttaatatggttttctattgctataaaaataaccaagccaggtatggtggtacatgcttttaattccagtacttgggaggcagaggaaggctgatctctgtgagtccaaggtcagcctggtctatagagtgatttctaggacagctgaggcatacatagtgagaccttgtctcaaaaaaaaaagaaagagaaagaaaagaaggaaggagagagagagagagagagagagagagagagagagagagagagagagagagagagagcaactcaaattggatggttttggattttcattttatccgatatactttttgaaaaaaagtctcttacaaccagataagttatgaggaatagaggtttgtttgtctcatagttctgcaaatggggaagtccaaagtcttggacccagcatctctagaggcccttcttgttgcatcacaacattgtctggtgagacagcgttcaagtcagagaaagtttgctgttcctgtcatacatgagtaaagaatctcaacctattaatcactttttggttgctgtggtaaaatcccagacatagttaattatttagctttgggatattcaaggtcaaggcactaactgcatcatcttaagttttaactgtgtcaaatgatggtgaatgccatcatgtaaggacaagaaagtggctgtatcttgaaccaggagcagagaagagcatgggtcaggcttgctccttttataggacactcaagaactaccaatagagggccacactaaagtgtctaaagtgccccagaagacagcccttatgctcttagtgacttcaacaccctgcttcccaacagcacagcaccccctagggaccaagccttcagctatccctaacccatgggaaatctgacccaaatcatagcacaaaggcctctctctgcctcccaagtgctgggattaaaggcgtgcaccactattgcctggccaccattaaacaggaatgaggagaccaagcttaatgcaaatgttgggagacacattctaaccacagccaggcatttgtttgctgtcatagtaatgctatgtaacaaaccattaccaaatccagaggctcagcacaagcattaactttaagtttgaaaagcagtggagtggttctgctgattctggtcacactcttgtcacaggtggggtcatctcttggctggttgttggccgatctaggataagcttgacagggaagaatgactctgctcttatcctccagtggttgagctcctgcatgttctaatgtagtggttctcaaccttcctcatgttgtgaccctgtaacaaagttctcatgtcgtggtgactcccaaccataaaattattttcattgctatctcataactgtaactttgttactcttatgagtaataatgtaaatagaagatattcaggatatctgatctgtgacctcctgtgaaagggtcattcaatcccaaaggagtcgagacacacaggttgagtactgctactctaatgactgcaaaggaacaagaaagaacagacatgtgtagaatttgaaacctagtcttagggctagacaaagttacttctgttgtgtagacaacctttaggctttaaagaaagcagatttaaggaaatagattctgcttaatctagagcgcaccactggcctatacaaaacctgatagcaaatctgggaaactctcctggctccatctatccatcactacagtgacaggtgtgccacctccaagtttttacatagactcaagggctagaatcaaggtcctcctgcttccatggctcccctggttttggtgctgtggtagagacgaagaatgattaaagcagcattaacattaatagcaaggtgacagtcaacataacagagggtcaaagacaccagataaaagaataaagcattgctagtggtctgctggacatgttcacacaacatcttatggagattcttagaaataccgaaagcatgggggcttcattagtcaattctccatccctctgacagaacacccaggaagacaacttaaagaaaaagagattcattttcgctcagtttcagacatttcagcacatgttccattatttatggggtctgtggtgaggcagggcatgctggtagagacagtgtggtagatagacctgcttacctgatgtcagtcagcaaggaaagagagagtcgagagagccagaaaggacatggcacacccagggcatggcctcggtgagctacttgctccaacaaggctctacctagttcagtttccaccactgcccaacagtcccctcaattatgaatgcataaacagattagtcctttggtaaggttagggccccatgagcagagtcacctctgctcactgaagcatttggggatcaagccttcaacacaaacccttgcagctgtttcagatccaagccctgagaatgcttaatccattagctttgactgcaagcaatacggaagaatattataaaaacgtgaatgtagtttttgttttctccttcaatatttcctatcttctcacatctcccacaatcccactgccacaatcttacatactttgaggagtctagctcttgctttggttaaaaaaaaaatccaaagacagaaaatcatagaaaatgcttatagaaaacagcaaaattaacaaaaaaaaggacacctcccattggagactagaaaagaatttttcagggagaatgccaaaataaataaataaataaaggaacatggatgaaagctgaaggacaggtgaccttgtgcctaattcctgggcagcagagagaacatgcagaacaagcaggcagagagagaagcttctggaaggttctttagcctctgtgtaagagaaacaaggtttgccgggcatccaaagagaatgtgacatacttgctaaaacacatagatccaggagctgactctaggggaccaataccttttctgtcttcactagcttctgtgacttcatacaatctccttagcctttgtgtcttttggcttcctcattctacaaaactggcataaatagagaaccactttaaagggctggtatacatccccctgaggatttacccaccctaggtcactcctgtggtggattcatttggcatatcatcttttatttctgctccccccccacacacactagaatgatgtttccaaggttcgtctgtgttgtagcacacatgcgttcttcatcccttttctcgccaactagtccaccatgacacatacacactaccattggtttgtcttttcatcctttcctgacattcagatgatttccatgtatttcttggagtacccgttttcaatccattaggaattgagtagctagctaatgtggtgatcctgcgtttaacgttttgaaggatggtcagtctgtttccacagcaggaaattcagttcctgattgaatcaaaagcctaacatcatattgtccttttaacatctttgggtggctagactctaatccgtaccaaatttccttgagctcaacaattcccagaatccctccagtctcaggtccctagagtctgagctggacatcatggttgcaatttcccaaccagaggctggggcttccctttgtctcttggaataactcctggaacaagatgacccaacccaccctgtctgaatcctcctcctgctagaactaagtcttggtccctcttccccagggtaagtatatgttattacaaaccgaaatctgccataagcttctttagacttactgattctttttaaaatggtttatcattaaaataacatgaatacagaatacaaatatgagaatacaatgaaggctgtggcagataagccaatgtgtcactaaattgcaaagcaaatctttcagtttgggtgttagagatcaaacctggggccatgtacattctcagaacacacttaacctctgatcaatacccctgctctagcaagctttctttcggcctttctgctcaagaagtcagccggcttctctaggggctgagcttgtattgcctctcaagagagccactgtcctaacctttacaagaaccacttccttgcctttctttacagccttttcactcagttgtgaatctctgccctctgtattccctacacattagtaattggatcccaaggacaatcagagtccaagatgattgtttagagtgaccgttgctttgcagattccatgctattcacctggaggcaccccctgggtttgttgttcagagtcaaggaactcaagatgtttatatccttaatttatttaatattgtaaaatgttgacattccagtgccattatttctccctcatttatttgctgtcatattatgccaagagaaacttctgctcctctgccatttagttatccagcaggaccgtttgtattttgaagacacacattggactcttgctctcgacttagcaagtttcaaagtaaacaatctcctggcatctcacaacgtgtgcgagtaagagtttcagaggacactgtcaagaacaatgagtctggtgtgttttggtctgctacagctgttgcctttgttgatgctgtgtgccagttttaggaggttctttctttaaatcagtgtatattcattgtttagcgtcaatgggtttcattatggtatttccatgcacatgtgtcatgtatcacgtgtatggatggcagtcacgtcccctgccgttacactctcctcgccattgctccatgtgatcatgtatgtataccatgatctcactcacatcttctcccattatgccctccttcccattgtgctaagtggctactggttgtatcacggggttcactttaccacctctgggaagaagttcttggggaaaagaaaaacatacttttagaatgttgaaaaagtgtggtcctctctctgcctcagcaaaaccaccatgggacactgcacctgttgttatgatttgagtagccaggaagtggggttctcgtgggacccacttctgcagcccctcccctccagcccagcccagagtgtcccttacccccacatgtgagcagcagtttggatgagtcttgggccttgagagatctcttttcctcagatttccactctacctcagccctttgcttccctaaaggacactccccagtttacaaatacgtcaaaggagaaaaatgggagcatttgtcagactcagaaaaacaaaaacagaagcaacatctccagagacctttactgggacacatgctttcaacttggaaatacaagtgtctgagatgtcccagtcaaggcttcccccagacctctgaggcttaaacacgaaaacctgacaaaatagcatgtcacagtcgaatttctacatttcatttatatttcttttcacaaacatgtgtttccccagagctttcatgtaagtgcaatggtatgatagtagtccatttgtgtggtgtattccacttgtcataatgttctctaggttcatccgtatcccaggatgcactgatactgcattcatttctaaagctgaatgatacccagtgtgtgtgtgtgtgtgtgtgtgtgtgtgtgtgtgtgtgtgtgtgtgtctatactacattttatctctcagctcatctgtttaacatcaggttgcttctgtcatatggttattgtgaatggagttcctgagaacacagatgtatgacttctgtttgagtactgttttctttttctatattttctctcatataagacatcctgaccaaagcctccccctctctctcctcatcccagcacccccttcccaccttctctctccttaggtccactgctctgtttccctacagaaaagaggcctcccgtgatattaacagaacacagcataacatgatgaaataagactaggtataaactctcatatcaaggatggataaggcaacccagtaggaggcaaagggtctcacaagcaggcaaaagagtcagagacccccactcccacagttaggagtccaacaaagaccctaagctaaacaaccacagcgtatatgcagagggcctagtggagaccatggagtagtattaactactgtctttaggtctttgaatcattttgagttgattttgcttgtgctgtacaatgtctctgtcttgccaatttataaacagtgtccaatggtattaagtagccttcccaaatcagcttcctaataaatccagaattccgtcacttcccatcacttcctttgctcttactggtctaaataaagtcacttctcaccagtgttactgctctggtctctttcccactctctttaattctgatccaacccagacaggctcatgttgtggtaatgccaaatagcagcttaaatacctgccctggctccacattgttctatcagtaaaagcccggttttctcactgacccttataactctaacatgatccagttacctcgctgttcttttcttatcaccctaaactcccctttgctcacaacaaacttcttgctagttcacaagcttgcctcacatgttctgggcttgtggtcttggcccagctgcctcctcgagctggaagttttcccccagctgcatccatgactaacgcttcatctccttctgtcaaatctgagaccttcttgtgtaaaaccacatcctaatgcttcgtgcctctgattctcctgttctcctactatctcccattcctgttgacatgctctggtgatacttcattactacattttctttcttctgtctctcttttttcccacctgattttcagccccctaccaaccagcaattttgtctgtatcaccctttgctatactcttgagtttttagactagtacttggcatagaatgagtatctcatatatgtttcatgagtgacatatataatgaaacctaaccaggtcagactgacaaagtcagtcctcaagtactagctagtacctgttgtactagggtattcctcctggtgttcagtcaacacgccctcataaatttcttcctgtcctctcagtagcccagtcctttttcactggtcatggcaacccaagattcctatctcttgtggtataaaggagttttatatttgctgccttgcattcccctcaagcttctcagaagtcagctccccaggtcagtccgtcctggagaaacaccttttgtttactccggctgaccgtaagttttctgttttcttcatctgtgacctagactaggcatattaactggcaaggactggtgagattgaagatcacgtgtgggtaccagtaggggctacagttgaagagttgatatccaagctattgatggagcccatgtagtggtttggtgtccagatgttgtggccgcccaatttgatgcaaagaaattgaagaagcaaagagcgagtgcttctgttttgggattccagcctgcccttagaagttatttcccagggctccagtggccacgacagcaagtggcagaccttgaaagtgtttgatggaatacgaacaaatagaaaagatactgggaagcccaggatttgggcagtagcaatggcagtgacaaaatctgaagacagagaaggctaggaaaaaatttctctgggtaaaagttgcgttgctgaaggagttgctagcctacctgaagacgaaagtctaggagctgattatgtatggttgagttttccactcttgctcagtcttgtaaatagaatgaatcaggcaaaaattcctagtgttttggaatagtaactggtttgtagagattttactccaggattggaaagatgcctttgttggcttttatttaaaacaaacaaacaagctttattacctgaggctcattcactagttcagcagctagcaggaaggcactctgaaggaaggcttttagtggacagtgcagatgaggaaagctcctgcttggattaacctacttggtcaacaggtattttgaccgggtgtgattttgttgatgagccgtcctgctgcagtttatctcttggggtaatagacatatcccaggagggcagcagcctcagtctgaggatgtgcaatagcaacttgacaccatgtgaagcatcttatcctaatctctgcaggtcaagttgctgttccgagtatagactggagtgtctgaagtatctgacaaactctcaccacatttccgacagatggtttgtgaacagttttcttcactaatatgcaacatactactgaatcagcttacataaaaacaggtgaggttttacagaagtcccagtgctgtttcattgtttgtttacaagcatacatgtaatttttgttgaaaactgttagtttagtactaaaaaatcttttgactcttgaacaaattaaaagacaatgaatgcccaggaaaaaaacccataattttccatattttattgaaaatagattccttttctcacataatatatcctgattatggtttccttccctgtactcctcccagttcctccccatctcctctctcatctacagccacccctttctctctctcattagaaagcaaacaagcttctaagggataattaaaataaaatataagctaaaataaaacctaatacatcataactggacaaaacagacaaacagaaggaaaaaagcccaagagaaggcacgggaaacagagacccgttcgtttgtatgctcagaaatcccatgcaaacactgaactgaaatagatacatgatatagtatatacacaaaggacctagaaggtaaaaagaagaaaaatatgtataaataaaattaagttaaaataataagataattttttaaaaaatgaaagaagaggaaaaggcttgaaatgacattatgagacagggaacctccaaagatgctgttgagttcattttctgttggccgtctactgctggtcctgtgcaaactcagctcatactagagctcctaccagctcctttacacctccatgagcaggtgctgagcacagaaggtacaagaagactgaggcaccactgggaattttctctaggaaggtgtcgtctggggccatgtgttccagcactgcctcaggctgcacctctggccctcagacagatggaaagatgctaagagacagggactcctgaccttgggtagagtgctctctatgtacccatctagataaactctccctcctcagggctactgtataatcagagaggctagttttagagaatatacaagaagccttgctcttgcgctttggttcatgggtttattggctgaaactgcacagccaacaacctcagataactacaagggtctgtttccatctcctgacacctgagggcacttctgttgttctgtagcttggatcagttcatgctgccattgcgagtctgctctacatgtccatcttctcatcatgggctccagctaaagaccaacagctcttgggaaacacctgattagagcaaggtcagaattttattgcttgggctccatgttagtggatttcctcagaactgtgatgaaatacccaatggaagcaaattaagggagaaaaggtctattgtgattcaaggcttcagaaacgacagtccattgtggaaggggaggcatgatggtaggaacatctctgcctgtgctagtggaagagtaaggcaactgcagctcatgtggaggctggaccaggaagaagcacagggatgatggaaggggccaggaataacatatccccaagaaactacccccagtgacctactacctttaggtagattctactcctaaaggtttcataatatcactgtcagttgagggaccaggtattcaagcacacaagtctatgggggacaaaccacggtagctcccatattgctaagtctctgtagttggctctttgcttctccaacagccagttactattagacagtttctttctagaactgtgttctgtggatccaccctgctccctgtgtttgaccctcctggctggttcttttaaccttacccaccttgttataactggctcttttgttaactctccttattctgcctgtttgggtatgctatagttcaaatattttctgtctataccaaaactcacattgaagctttattcttcaatgtgcagaattgggagatggtgtctaatgggaggtcatggaggctgggccctcgggaataatgaatgagttctcgctctcaaggactggcttagttagaagagggcaggctttataatggaagactaccattcaagttttgtctcgcctccttgcccttctgcctccccctccctcagctcgccacttcctcttgttatgaatatacataggtacttagcctgacacacctgcctgatcttgcacttcccagcatccaaaaccatgagccatgataaacctattttctttgtaaattacccagtgctgggtattctgttacagcaacggaaaatggactaagtgccatggctttcctgtcaagacctgtttgattgagcattgttaccagagctggaaaccacacggatggggctgttctcagtagacagaacagggcacgaaggggtgtgggtgcctgagacaacagaacctaaatgctgagccagaagaggcagccttgccagcagccagtgtgtcccacaaagctcatcttccccattgccttgtttcttacagccctagtccttgccctatgttggaataggtctgtctcctgggtgccctagacattcctggcatctctatatgttggtccttctgcatccaagcttgtgccttcagctttggggtctttttaataataactgtttcctggaattggattggaattttgctcctctacccttggtggatgaggccaggctttacagccccctacctggcaaggtgcagtaaggggagggtgagaggagggtaggccagaggcaagaagctgtcagtcctccaacagtgctttctacagtttcttcatctttctcttctccctggcagcaaaaccaaaagctcggtccacaaccacaggttctgaacatcattggcaaagttcaaaagccttgtttgaggaccagtcaggtagatggctttctggactctgggatatagggatcaggggcacaaaagcacaaagtggtctcactgtggaatgtgtgtagctacctcagaacaaccagatctctcctataaggaatatgcagacttggagctggcatctctgaggatgtcactccaggacttgcccaggtgcctcacatcagccctgtttactcttcactcctccagggattctcttacttcctcctgtcctaacacatattaggcccctgacctagtccagcctcctagaacatagaaactgccccctatggctgatctcaaggacagttagcaatattaaggattatctaaggtctgtgtccggtatcacctcccctcttctcattctctgcatctgtttttgaactattagaccccttactagtcacactgtccaaagttatttagctatagatttggcaaaagactcagaattgaggagtagtaactataaattaattgagtagaatgaattactgtagtttcctgtgccatcaacagagggaccaggtataggttaaagcgacaacttttctgtaaacttaatactttaaaaaaaaattcaaaagtgtctttaaaacaaccatggccacatgtaataatatctctttccaccatccacatgagttccccaccaccacattagggctcccaaataacacagagtcttaccttaaatacaatgctgctggccaatgactaggatttctttttttattctgtaattactactcatatttacatatccatcccccattcccttgccctcccatcctcccatgttccccaccagtcaccccaacaccccccaactcctccccagggatagtgagtccctccatgggagaccttcaaagtccgtcataacatttgggggagggcctaggccctccttgctgtatctgggctgcaatagtatccctccatagggaatgggctctaaaagtccatttgtgctctagggataaagactggctccactgttagaggtcccatagagtgtcttggcctcctagctggcacccacattcagagggcttggtttggtccaatgctgtttccccagctttatgactagggtctccatgctatcagtaggtcaggtccactgtttctgtgggtttctccagccccatcttggctcctttgctcattcctcctccctctccacaactggattccagtattatggttcagtgcttagctttgggtgcctgtttctgcttcaaacagctactggactaggatttcttaaacgctagctgtgtcttaagtatcaaccatagccattaatctatatatggataaagagttatcgagtactgtgctcttcccaggatcacatggcaaccctgccttttactacatttcctagattccttcttctctcctagtcccacctaacttgctttcctattggccaacagtgctttacttatcaatcagtaacacaaacatacacacagaaggacatcccccatcatctcctcttttctgtctaaataagaagaagggttttaacattaacatagtaaaatatataacaaaacagttatcaagtaatagttacaatatttagtccactaccatttagtaagatttaaagaaaatattctatcatctatcctatctttgtgagtctaaggtcttatatgtaacttatcttttatagcaactaaagaaaactataactatgactacctgtcttcaactccatcaaagaccacagaaggataatatataaactctggatctgacagagacatctggctacagtagtcacccaaagttcctctgtaacattgggggatccatcttcagcctataggccacagtgtgactggcagacttctccatgaagcaggaacccttcaggactgtcttgttttgcaagttcagtagtcactttcctgtgggtcctgcacatccagtttatcagcaacaaacagtccaggcaagagcagtttcttacccaaatggctaatcttgccatgttgaaggcaaactccatattgagtttcttcgttgcccatcttcctctcagacgcaattggtgtgtcaggagcagttgtgtctcactgtcatgaaaaaccctaaaccatctaaatgccatatattctgtaggtctttgaaaggtttgaagactatctatccatctcaaatacatctctgtatatctagaaaacctagttaacctaactgtaagttttgactattatacatgactatataaatctgtatttaattatgcattacattttaaaagatctgtataaacacaataccaaacaagaggagaaatttacatatcacaaaattgaccttaaagttgtatcaataaatgaaaatccataccaatgcaaagtgttcatttctatatcctattcccctttttgcctttaaaaagagattgactgtgatcattaccatttataaccaaccccatttaaatgaaaacaaacaatatttgggaatttgggcatccttctggttgtagtgtcaagtgatttcacctcagtcatactatgccaaatttggtaatgagaaaagttgcaaacatgtattaacacagtcatagttacaaagtgaagattttcaatccatatttatgataattcctctcccagtatttttttcccatagcgctgggtgttgtagccaagcactttgctactgagctgtattccctagactccctactagttttttgtcagggtcttgagcattggacacagctagaaaaggaaatcatagactcgccaaagtatttccataccttttaaaagcagaaattcctaaataaattattcttctcacattatgctatcctaatcctgcattaaaaactactttagctaatttgtcaattattggaaatgaatttgcaaattttctataaagcatgatgcagtgctggagtggcatagtactcactggtgaatcagtcagatgataaagactgaacctgaaaaaaaaaaaaagaaagaaagaatgtgctcatgagtggagacagcctgaatgggaagtgcctttgcagaggtggatgggatggacaaaatgtcctggagtacagtacatgtgttgtgtcctttgatgaactcccccaatgccagatcccataggagagctgcagaatgcctgcccaagcctcatgcgcaggcctttgcagcaccctccacttagtttcatactgtgcttggtccagcagcacaataacaaagagcccttcttttctgttgcctggcttgtcccagcacatatgcattcctggatataaaccagtacagcacgtcctcacagaggggcagtttcacagtcttgtcttcagagtagtggttctcaatctgtgggtcatgaccctttgggagtcaaatgacccattcacagggttttatgtaagattttggtttgagatgaagtttctggtcatgaaagctgctgtggtggtgtgaggtgaaatatttctaataggctcatttacttgagaacaattggtccccagtgctagtggcattattttggaaagaaccagtgatggataaaggagtcagtgggggcctggtcttgaggttcaacagtgagctgtcttacaatgttgccaccaagtctttactatcatggtaggccataactccttgaattttaagttcaaataagcccttcctcccttaagttgcttctggctaggcatgtggtcagagcaatgtaagacagtgaaactggtcacccaccaaaggcaacttacagggtcaactcaatccatatcaagagtccaatgcagcttcacagaaagtgaaaagtaatcttaacagaggcagcctagagaatgggaaagagtcatcaccagctacacatctgtcagaaggtagtatctaatatacaaagacctaaaacactaaacataaaaacccaaacaacccaattttaaaaagaacatgcacttgataaaaatgtccccaccatttgataggctggctcttccctggtacagtggtgtcctttgctgtacagatgtttagtttcgtgcagacccatttctcagctgctgatctaaatacctgtgctattggagtcctatgggctcttttaatgttttattaacaaataaaactcaggagtcagatattagggtgtaagcctgagagacccacagagagatggaggaaaagatcagctgccctcctctccaccttcccaagcccctccttatacctctctctatctcctctgggtccaccagaaaactctatggtttattccttccaactgatcatggactctgccctctgaatcaaggtttaacttcattggtagcctcagaggacaatacaaacaaacctcccacaacatctccccttttttaaaaaagaaagattaactcgaacatagtaaaaatatatatacaataaggatatttatcaaatacgaattacattcacaatgtccaatccatttgtatttggcaaattcagagaaaatactccattatctatcctctcttggtgagttcaaagttttgtacctaaattatattctgtcataactaaggaaaactgtaattataattatctaggctcaaccccatcagagacctgagaaagatataattttacccgagtaaacaggaagtgcagagcaaagaacttccaaaactatagaaataacagacatctgaatgtctggacagtcccccaaggctgctctgcaacactggggcatccatcttcagcctacagtcctagattatctgacaaacttttggggggagcaagaaaacttgaaggcctgtcctaccttgtcttgcaaagtatggctgtcctttcttttgtgtcctgcttgtccagtttggacagcatgctgtcagcagtcaagggcagttacctcccttgtggctaacttttcagtcttttaaatcaattactgtaatagaccatcctttacgtaataaagaaggcaagggaattccacgatgtatagtttccattggttggatcaccttgttaataactcttaaatctgttaccattctccatctttcagatttttttaatggcaaatataggacaaattccaaggattagtcaattcttcaatattttgagcatttagctgttcctgtaccagctgttctagtgactaatttttctgacgtcaaaggtggttgttccacccagacaggttcgtcagttaaccatttcaaagggctgtttgaaaaatcaccggctgttgtgtccttctaatgtacaatctgtatggtcagtgagtgcttgataataccttttaatatttctcttagaagtatattttattttgtggtttgcttttgagattggagtaatattaatctgcattttccactgctgttataaatcatgtccccataaattcattgctacattagccacatatggcttttattttcctacctgtccttctggtcttatacaatcaatccaccttttactttgttttacctgagataaagtaagattggcctcccaaagaggtcaatctggatgccaagagtttggtgaaattactgttacattcacacctgtgtgcagcaaactttcaattacaatgccatttattcatatatttatctttggtctttgatcatttatagaagtttgccaaaatacttttgtaggtggacttttctgtcctgccagccactccccaaataaccacacagagaattaatattaattataaatgcttggccaatagcctaagcttgttttttagctagctcttatagcttaaattaacccatttctattaatccatgtgctgccctgagactcatttatctcatgtatttacttcctatcctgctcactctgtatctcatggcatttcctcctgacttgatccttcttcttcccagcatcctcctagtctgactctcctgcccaatttcatcctgcccagctataggccagtagctcttttattaaccaatgagagtaataagtatttatagtgtacaaagattgttccacaacattcttgttttatggtggctcctgaaattttttgttttgtttgttgatgcttttctgtcattcagagctgcatgtttttaataggcattaggtcttttagttgctctgtgggggagtttccacaatgctgacagggaattattgagccacatttgacactagggcctgtgaggggacctataaggcatttcctgatggcaaagtattaccttgcctgtctcttgttgatctgtattcattagtccagtgccaatctttgccacgccttcttcatactccagaaggctggattatctctagaaaaaaattatttctaggaacaccttgtccacaatctcttttcaggtgaccttgtttactacaaaaatatctgacctcttgacttttctcaaaatttctagaaattacttctcctatcaaacagcatcataagtgcaaattccattatcagccctacttttaatccattcatctattggggcaaattttgcctttaaaggcctcatcacccctttacattctgaattagcatttcaaaagccaaagattcaattaatattcatctgatttctggatctgacatttctatttacagctgaagttgatctttgtaaaaaaaaaaaaaaagattagaacaggcttcttttgggccttgtataattttaataaatgactcagtcctctttcctgattattcaaccttgtctaagcatttaaagttgctaatggaatagggccaagatgtgatcatcaaattgttcttttcaactagccttcacctagaagctgatttggggaaatgttaatgcatctagccttattttgttgttctatgagcttgcttcctctgtctaccatgttcaccattgtaactaaggaccagcttccaatattgctgtaactaaatctttccattcttgagggataagtctcttcttactggcccaggaatttagcatctgtttcacataggatgaatgcacacagtatgaaacgactgcttccttaagtcttctcaaatctaacatttctagatgactccagttaacttatgcataaccttggggtgcccatcatctggtatggtaactggataaactaaggttgggccaccactcttcagtttcatcatgcagtggtggaagagagtgaccgcctgtataaagaaaaagagacacagaatttatactttatacaaatattaatgcaaaatagatataaagatccaaatacaaatctataaaaactctaaaagagccgggtgttggtggtgcatgcctttgatcccagcactcgggaggcagaggtaggtggatctctgtgagttcgaggccagcctggtctccagagcgagtgccaggatcggctccaaaactacacagagaaaccctgtctcgagaaacaaaaataaaaataaaaaaataaaaaacctgttatcaacagacagtttgacagctgtgctcttggtttgtgccttgttcactcaaactcatttgaaagcattcatacaaactccacacatgagtgttagactgattttgttcataatcaccaaaaatggaagtgtccaagccatccttaatagtgaaaagagtaaacacactgtggtcatctatatattggaattctttagagttgtggagaaatgagctatagagccattcaaaggcacagttgaatcttgaatgcatagacctaagtaaaaggaacctatttaaaacagctacaaactttatgattcagttttcagaaaaagcaaacaattaagctgttgtcataattcaaagagtgatgggccaaccagagatggttatattgattgtgaaataattatatcatatcatattatcatggcacaataccactttcaagagctataaaaccctatagcatgaataataagactttatgcaaaatttaaagggtgagagggagaatcaacctctcccaggaatgagccctttattaattgcccaatgcagagtgaccagccctgaaactatatgcacacaaaaaacaaaaatggtacagcaagatatatatatatatatatatatatatatatgaatgtaataaccataatcaaaggaaaaagaggcttttgacttgagattgaggggaacacaagagggagtgacctgggaggagcttcagggaagaaagggagggggaaagtggtataattgtatttcaattagaaacatttttaaataaccagtatattgggggatctcagcaagggattggtactgtcataggaaaacctaactatattgcaaccgcatgaggcaatgtactgaagagtgtgaaggagaggtgggacattaaaaagttcataaatatatgtagcctataaaactaaaagcaaaaataagcacacatacattgtactctaattgatcaagttgtctcctgcagggtatggattaacaattctgatactaatatgtgtgtatcctggaattgaacaattaagtttctaagtgttggagtggaaatttagaaagcacaggaaggggctaaagtgatccaggtgacaatggattgtttaagacatatctatatgaactcatagttagctcaatatagatatagatgaaagcatggacacaagtgtatatatccagatcagtaaacagatacattatccccttgctcagtttacattaaaggactggaagctataacacaccaatgatagtaaggacacaaagggcacagatattaatgtctggtgctattctctaataaaggaaactgcagagaaatggctaaatgcaagagtgtgacaggaaatatacaagatggttttagagtatcatatagtaccagaaaataaggaagtttgagaaagcagtatggttgtttcaaagaaataaaggagccaatttgaaaagagatcccagtagttaaaaacagaataatctgagcagcgaaagacataaaacaatattagaccccttatgaaatcagcacccatggatttttatggacacatctctcatgcagcaaaacattacttatacagaattctaagtactttctgtatgtattttgacctcacaaaagtagaacatggacagtgtggtgtggtggtttgaatgagaaagtactccacaggctgatgcatttgaacacatggtccctggttggtggtactatttagggatgtccagaatatctaggtatggcattgctggaggaaacatcaaaaaggacatactttgaggtttcaaagtcttaccaatcccagtgctagatctctctctctctctctctctctctctctctctctctctctctgtgtgtgtgtgtgtgtgtgtgtgtgtgtgtgtgtctgtctgtctgtctgtctgtctgtctgtctcatatttccttgtctctatatatctgcctgcctctgtcctctgtgtgtgtctctgtctctctgtgtatatatgtttgtgtctctgtctctgtgtgtatctctgtctctgcctctctgctatgtgtttgtggatcaaggggtgaactctcagcttgctctttcagctaccatgccttctgcctgttgctaagctgttcctgccctcatgactcttactctctggaattacaagcccaaataaacatccataaacgttgccttagtcatggtgttttattacagcaacagcaaaaaaaaaaaaaaaaaaaaaaaaaaaaaaaaaaaaaaaaggaatgggtacagagggaacaaagaataattctacaataggaaaacctgacaattctaaaatgttgcaaaagtgagagccgaatgaatgcaacgttggaacaaaatagagatgagacatgagctgctatcttcagaccatggcaaccgttaaagccctgatctcatagcagatgtggacttgtacaagattgggtctgtcagcatccaatcatggatcaaacaggagctccaggactctggtggagagactttcattgccttcatttgcgtattaaatggtgatcccaccacgctccaacaaatagttttaaacctgtggccacacagtcagtcctagttaaaactgaaggctcacaaaaacaaaacaaatatgggaaagggacttggctgggagataaaagagctgggatgagagagagtgagaggtaaaaatacaaaattgtcaaagggcaaatgtctatggtcaaaagaaaaagaagaaactgaagagatggctcagcagctaagagcactcattgctcttcctaaggacctgacttaggattcctaaggatcccagcacccacactgggcaacttacagccaactgtaacttcagttccaggggccccaactccctcttctggcatttgcaggctctacatacaggtggtgtgcacacatacatttagggaatacacataaataaataaataaataaataaataaataaataaataaatcaaataaataaacatcccaggatgcgcttccctgtaacgtgatgggaatgattctgtatctatacaatctgcctccagagaacctgtaagcctaatttaacctcagggaggggtaagaaaatctcaaatgggcgaatattttataaatacttgtcagtcgttctgtgatgtcacgatcatctaaaaccaagaaaatacaagaaactgccaaacaaagaagaacctgaaatgatggaatttctaaatgttaatgtgatatcctagatggggccatggatagaaaatgtgtattagataaatctaaggtaatctaaataaaatatggactcaacaccagtgagtcaatattgatattaagttccatcatagcaaaagtcctatactgacataagagattaacaattggggaaactatgtacaaggtatacaagaaatctgctctttttgtggcttttctatgattattataaacttttctaaaagattcatttttcttaaacggagaaaaatgattacacgacttgggaggctgaagcataatgatcactagtttaaggctagccttacatacatagtgagttcaaggctaccctggagtatgttgtgggtctctatctccaacgacaggagaagaaaatgagagtatagtatagcattagtatagaaagcccagtatgcaactaatgggcatttcacaaactcgggggtggcggaaacatatgaaaattattaaagaagatgagagtacattccagaagtaagagatatgttccagatgaaagaactgtctgcttagtgttcagaacaaatacatattttttttaaaaaaaataaggttgtttcattttcgtgtaaataaaagacaataaatagaagctttgagggctcagagagaagtcacacagtgcaagagaaatttttaagctgtttcttctccttctcctttgtttttttgagacacggtttctctgtgtagctctggctgtcctggaactcactctgtagtccagtctggactccaattcacagatattcacatgcctctgctcccgagtgctgaaattaaaggcatgtgccaccatcacccaatgaaaattttaagcttcttaaaaataaaatgggtgagggaatctaacttcctagagtcgtgatcagatgtggaatgcactgggaaatgctttatttgttctatgggaaattatccttcctaacagtagccatcaccaagtggatcagcagaatcaaagcattttatgtgcatatgtggcatcaataaatgttcttccaaacatttttcttaggaagtcatgctgaatgtgctttaccaaatggcagactaaaagaaagtagacaacaaaagatccaaggatcacaagccaatgtgacagtggcaatgtgatttcccggttgatggcaatgcaggatccagggtggcctctgtgtagcagttcccagcaccactaggtatatactccctctgtagaccaggctggtcttgaactcatagagatctgactgcctttgcctcctgagtgctaagataaaagacatgtgccaccaccacccagcttagtaaaaaattttaataagctacaaggagaataataatgaaggaaacagataaaacaggctgcagcttagtcagttactttctagctcaggctatcctaacaaagagccacaaattgtaggaatgcattgtttgttcaagttaggggtctagaatcatcaaagtgccagtggggcagtggtctcagagaatccttgcaggtttcttcacatcttttaattggcatctgtgattctgaccttgtgcaagctgtaacttttctttttacaaaaagcctttagtctagtttgaacttgctctgaggtaaaagtgaggtaattatgtgcagttagcctgagtaagagaacaaggcaggctgttaagagtccacagtccttgcaggacaaatagatgtggttatgaagcatgtcccagtatatatctatatatgaaaactataagtaaatgaaaagtcttccagaccatctacaaatatatgtgcccagaatacaattaactgtggtgctgggggaactgtggtgatgtcttgcttgtacaaataaagccatgtcaaactttgatgtgataagttttccctcatcttattatattttattttgtcttgttttgttgttacctcttagaagcctgttcttttctaatgagagacagaaatggagtgaacctggaggggaggagagggggggaagctgggaggagtaaagggaggggaaactataatcaagatatattgtatgagaaaatctgttttcaattaaagagggaaatgaggaaggaagtatggagttcatatctaggagttgtccctgattctgatgctcctgaggcaaaggagttgaactgcgtacttgtttacagagatggcagtgctagagggaactcgacgaaacttctaatagcgtttgcctctatgagaaacaggagagaaatcggcctgagaatgtgaaggtaaatgaggaacaggaaactcttaaaataattctacatagcttctctaaataaatacactgcggtctggatttgatttgagcatgtccccaaaggcctgtgaacttgtggctaggttgtcagtgtcacaacctagaggaagtgaaactttaagaagtgggtgtgggaaggagttgggccattggaaggactgctcttggtaagggttaaggcttttttgtttgcttgttttgggcttgttttgttttgaaactgggtttctcggggtagtcctagctgtcttggaactcgctctgtagaccaggctggcctcaatctcagagatccacctgcttctgcctaagtgctgtgattaaaggcatgtgccaccacctcctggctaataaagcttttgtaggactcaggttggctcctgtgtgagagggtggttagaaaagagccggcctgggtctgctctatatagcttgtagcttcctgtctccccctcgatagtgagctctctccatcaaatgggcttccaccacagtgccatctactttgccgtgatatagctaagatgatccccaccagatggcagctgaataggtggggacacctaatcttgtccttttagcctccaaaactgtgtgtcaataacctttttatatgcccaataaataaataaagttaggacaagatgttacatgtaaatgttatttctgtctttcagtggtgttactacacagattgctgatttttctatatagttttaattttagccttagtggggaaagttctgatcttatcaggatatttcatgtagcttccttataactaatttcaaccatgtagctaaataaactctcatcagtcagggttaagttggatgtttgcatggtcagtgtccaaagccatctatggtacacattggtactttgaaaatatttattggggctggagagatggctcagcagttaagagcactggctgctctttcagaggtcctgaattaaattcccagcaaccacatggtggctcacatccatctatagtgggatctgatgccctcttctggcaaaaagtcagtagggcactcaaatacataaagtaaataaataataaatatatcttttttttttaaaaaaaaagtatttattgaatgaactagttgggtataagacttccatgggtctcctggaaggcaacaagatgaacaatgccttcctttatcctttggatactgatataaagtgtgtgaactgtcttgaacctcgggggtgaagactaggggcagagtagtgagtgactggaactaatccttataactacaaaaaagacacctcataataagacccagcctttctctgtatttttttttttacagaatgaaatgttatccaattggtttaagctactggatttatttttaattctttccagtaaaccctaatcttaacaggaacaatgattcatctcctaacaacaataacaaagtagcaaagtagtttccaggaagatggcagtgtgcatgaaagtgtctcaattaggattgaacttggacaatagcagcggtttcagctggacagacatttatatttcgcccattattgaaatttcagtctagaaggttcaaagtttggttccactgactttgctacagctccccctgaactctgtgggatgggacatgtgaagctgtgctttggggaccacagtttccaagaggactcttaagttctgtcaatggccaatatcaaggtaatctcagtaaatggtgattatatctctccaactagtaaagaaacacaaaatgaatacacttacctggaagcacccaactcctcgacatcctacaaacacagaatgctagtaattccgcaagtcatgaatgggatgaaaatcaacctcacatctctacttcatctctcacatggaacctctcccagctcaagctcagtcagggttaggcctgtgtttggcactgtactttgaatggtttaaaggaacagagcgagaaacttcacttcccgttgattctcccagaggatgtgaacgttcttcagggtaaaactcaagaggcctgagcagacaggggtatcctgaaacacattgatgcttcaagaactacagggtcagagcaagagtagcaaaataaaggttgggggtcatagtgccaacctttgcggcactcaggaggctgaggcaggagaatcaccacaagtttgagcctgctttgactacacagtgagtttgaggctagactagactacaaagtaatctcctatttcaaaaatttcattaataaaatgtatttttcagtttatcagccatgcctggctttacgaatgagtgccagggattcaaactcgggttcttatgtttgcacagcaagggctttacccactgagccatccccatagtcaggagattacttattttcatcccaatgaaggctagaaatgatctgtgttgcaaaatggttatgcagaatagcagggctggaatgaggtttcccagaagtatgaaaacaagaggaccctttcctgccctggaggttcacgggcctgtgacttcaccactttcaacttcagctccctttcaggccaattaaagagcaaacacagaagggaattttcttttctaattgtaaaggaatatttcaaatagatctgcctggtgcaattacttgtttggggtacttacttggcacaatgtagaattgcttgggcaaagagcctcagagaggattatccaaagtaggttagtcagagggattttttttttttgattgggttaattgagctgtgaagactgtggtcatctaaatgagatgtcctccatgtcctccacaatctgacaatgtaggacaggacagtaaggacctcctcctcctcctcctcctcctcttcctcctcctcctcctcctcctcctccttcttcttcttcttctttttgagacagggtttctctgtatagccctggctgtcgtggaactcccaccaatgaccaggctgtcctcaaactcatagagacccacctgtgtctaactccctagtgctgggactaaaagcatgcaccactgcatcctgaacaatgagaacgtcttaatcattggtgaatgacagttgacttgaggaagaaaagtggattttgatggttgtggttttgtgtgtggcatttatgtaacttttcaatgtcactgatcccttactgctctttctttcttttgtttttttgtttttgtttttgttttgttttgttttgttttttcaagacagggtttctatgtgttactttggagcctgtcctggaacttgctttgtagaccaggctggtctcaaactcacaaagatctgccttcctctgcctcctgagtgctgggattaaaggcattaactgccaccacctggcccttcctgttctttctaacatcacatctctctttattttctcttgtagctgtcactacctctaaacaaaattttccaatttttcgtctatttatttgattttctaacatctatccagactctgaactgtaatcaccatgatttcaggtcccccccactgttctgttcaccatgttctccaaaacccagcacaggaaaggtattgtgtaaacacaagttggacaaataaagacttaaacctcgtgatttcatcttaccaggaggtagtaaatattgaaatgagagtcaatgtcatgtttcctcaagtcatggtgctttcccgtggttggctatgatgcttgagtgaactctatctggacttccattttctcacccataaaggagaaaagcaaaggctccctcctagaagtgggtccataaatgaatgccagcaccaacagtggaaacttcttaggtgatttctatataacggcatgcattcactgctcttttgtttgtctgccacagattcccctctctgtctgttttgtgaattgggttttcctccaccaagaatgtcaacattattaaagaggataaaatatcacatcgtttctgttgaatgcgttgttagggagggagtccttttcaccttctagactcagagcttaggcccagatgagcatccttggctgacagcctctgaagcagcagaactggtggtcaagaacaatttacatttctcctccactttcagcagtggcaagatgatactgagctccagcagtttggactttttcagtctatcagggatattatctgggagtaggtgtggggattttggacacttaaagaaaagattgtctgcaaagaatgtgaattatagaatgtgtgcaaagaagagaaacaatatttcaagccgaaaggaatttgttcgttgtaagattacaactcaaataacacaagggcaggaaagaacatgtatttgagttctacttgaaagttgcataagtttaatcttgaaagttagctttggctaggaacgcaggatcgaattataatcagagcagcttgcagtcatttatgtcctatgccttgagactgaacccatgcagtgtgtggaacagattccagagatggtgtgagtagccaggcagcctctctagatgattttgtcagaatttctggcttctgggcttagctctgctacttgtctgtgtaacctggggttcacatctccacccatgttcactgtcctgaatggactgtggacattaaatgggactcacccaaaagacccacagagaagattaagtagagtccatggtgttcagtcatagtaagctttcagtaagtcttagccactggttatattaaactgtaaagtccatgaaaatataagaatattgtatcttcacttttgtccttcagggtttttatttcaatggggaatttttacaaaacatgaaataattaaattaataactattcactgctgaacgtcttttcttcctgagtttgagggctggaggaacatctcagcagcggagagcttgcttagcatgtgcaaggctttggattcaatttctagcactggcaaagaaaaacaaaacaaaacaacaacaacaaaaaaaaaacaaagaaagacgtttttgatgaaatcatggagattacttaatattgtgagacaaagtaaaaagcaattctaactcatccagcacaactatggacagtttgtcgccatgagaaatgcatgtgtcttgaagccacaggtgtcttagagctgctggtatcttggcaaggtggggagaaaacactgagtctcatttctagttacactgtggaaatttttcctagccttgaatgaagagttgggaagataagggaaagaaaaccatcaacccctccacacatcttgtctttgactgtagaattgttttcattaaaggtgttttatattcttgtatcttgtatctcagtcttcttctttatttagtgtccaaacaccagctagctgtgcctgccaggctggaggaggaagcaagatgtgtgcctatccagacttctgataggacttctgtaggatctctgcatgaggtccttccaggttggtgatgctgttccaccctggccgctgatgccaatcggcagtctttccagtatttacaaaaccagctttatcatgcttccaacctcagacatactaagggcccagtatctatccttaagggctttggtctctggctcacagggctccttattccaacccagaggcaacagctcaagctaagacatatcccagcagcccctctgttttcccagtactggagactgaaacttgtacctgcacattctaggcaagcgctctaccactgatctgtattccctgcccagttgtcacatccctattataaagccttgggtttggcctctctgaagccccttctctagttatctaagccctagtctttcagctgcttccttctgcctctccagaccccaccatggtgactgcttctggcagtagatagccacacgatatctatgtgttctctgacttttgtttttcatccttcagtttcctggttattggcatttcatgaaattctctctgttaagtgaacgctgtggcttccatctcctgttacagaacaaataaatccatttttcaagaaagctttagatttgcaagtgcattttctcagcatgtacctttaggcttgtgaaaacaatcacatttatggatgacgctaaaatatcaaatacaagaaagagtagctgttcctaagcagcactctgtcttgaatgattctattcaattttatttaaatattgaaaaacagaaagtccaacctcaccagttctaatccaagcaaatgcaggtggttttttcctctgagaagtgcattttaaattgaaccacatcttgatctgttgtgcatgtgtgtgtgttggggggaggctggcagtgagagcaggacctatcccaggggcatgaactggctttttggagccgattcctatggtgggatacttagctcaaccttgatacagggttggggcttgatcctacctcaacttggtatgccagactttgttgactcctcaaggaaggccttaccccctctgaggagtggttggtggtgggaagggggaagaggggggcaggagaaggagagtgagggggaactgtggtgggtatgtaacatgaaaaaataaataaataaattgaacaacatgactatgagtttgatggggtttgggggcggtgtgtgtgcatgcacctgagggccaggttagtccagaaatttctctctggccccacagtttcactccactttttcactgtatcacagaacatttctctgctactccaatggggcagaactccaaactaatggtgatcatacaaggggaatgaggggcaaagggctggggtcaagaactaatgtctgtgaagtattttctccattctggtgctgcctgttgtatgcctccaaacgacccctgtttatgttacccacataatcatttcacaggtgagtacaccagggttcagaggcattaaacagctaatctgctctgagagcattctcaaagtcagattctggttcagccccccgaggattcaaattgcctctttccttcagaaaacactaaagggagccagagagacagcttaaaagtaccatgtaagcctaacaacttgagttccattcagagaactaatgcggacaatcagttgtggtgatgggcatctgtcactccagatgggagatgggagacaatgaagaaaatcactcggatattctggagccagctagcctggagtacacagtgtggcagaaatgaggggcactcatccctacaagaggaaaggcaaggactggttcccgaaagttagcctctgacttcacatgtatatgatggcatgtacacatgcgtgtgcatgcacaaacacacacacacacacacacacacacacacacacacacacacacacacacacacacacaaacaactgcctctcaattctatcgacaaagcatagtgataacgctgtgaacgggtattatctgttgaccacgtaaatagaaacccagtagttgttttatgcattcgcatggtcctgctctccccatgccctttatagatggttcactgccttctgtcaggaaagcagctttcagagcacaagtctctgggaacttcagagaaaaatcaagtacctgcatgatacaactttctaacatttcttcagtgatgcttggcatacaaagaagccttcagtaaagacagtctgctgagcaaaataaatatggatccaggtggagataaagatgtcccggacatttggaagaagaaccacagctgagaagatgtcagcactagaaactatgatgataaaaacagagagatggaaatagcaagggcggtgagcaagcctttgtcagtctccaacctgacagtactgcctagtagaagaaacactgtttcttaatctctgcttatttctcatcttgagcttgactgcgtcagagatttttcagtaaaagtgattttatgaataattttacattgatatgtgtgggacagatttgagggaaaggggaaccaataagcgctatgatacaatgctctataattccttatgacagttcccagaagtgattacttgctgccaatgtgatttcttctaaatatgatttctgtttggggaaactagcctgaatcgaaacttttgcttatgtgtgtttgtggtgtacaaaatgtaaacacgtgtgtgccagtgtatttgcctgcaagggtgcagatgaagaccagaggtgaatatcagaatgtcttcttcagtcacttcttcagcctgtgtttttgagacaaggtttctcattgaagctgcagatcactgtctcagctagcctggctggctggtgagctccagggaccctcctgtcttcaccatccaccccaaagcgtgggtgttactgatgcatatggccatgttcagctctcgtgccaatgctggagatccaaatccagctcctaagacttactcggcaagtgtgttaaccactgagctatcgctacagtgtaagattattgaaatcagctaagtgtgcctctaacactacttcttaccattgctctgcttttcagggagccctggccatgtgcagccatcacccaccctattcctatctcctactatgataacttggacattggcttctgctccacacttgggcttctatcccaccagttaacatatactaagagtataatgtacccacgaagtcaccaagaaggtgccgagatatgagggtggctaaaagcttattgctaagttatgagagcttacaatgttctgtgctcctttttgtcactttcatcactttgaaggatgatgaacaatagtcagtattatgatataaatgatactaaacaccctaaggaatatctgcttccctagaaaatcaaaattcatcccaatgggaaaattccactgataggtggatattttaatagacagcaggtaatgacagagaaatatgctgggatcatgatttatatttaaaataccacagaagattattcatatatattaatatctatttacacttgttagtaattgtttatccatgttaactggattccacaaaacaggggaaacacctgatacattgccaagattcacagaaagacaagcagagaagcagatggataataagtagacagacaaatgccattgggtatctcggggacctgaaaaggagggtaatggtagacagagacacaagactttgggttaactttaagaatgaacaatttttattttcccactgctgtttacatattgtttagctaattataagacataacattgcaaacataacttgagcaaacagaccctttgaccccctggccttgtggccttgttttggccagaagacattcctcctaggctttatctcctgcctgaagttctccatggtcacggggccacatcagggtcagggttttgtgcttgagaaaagaactgcagagtatctggatcccaacagatggatggcctacaatgatggtaacatctataaaatcttgtcacctatgtacctaaaagtgtgagaagaattgacaaggtgagtagagaaaactaaagccaaccttgccagagatgctggagggcattcttgtaactgctgagactggaaaaacaaagggatgatttgagataaaatcctagacgtttattctcattgagacagccaagcatagtggtaaatgctttgaggtcagagggtcaggtgttcaaagccatccttattacacagaaaatttaaaggccagcttggcacccaccccctcaatgtaaacatgtttaataccagcaagtattgtaatacagtcctatcactcataaaaatccctgatgatatatcaaaatgatatttatagtttaaaatgatagaaaactacacatatggatgtaaaatggaaattaatgtaccctcctcaaattgttgtgttgaagaacttaagagaactggcaatcaaactgcaacatctgtgggtttggagtcaaattaatgatttcaaaaagatacttatactgtatttaggagacttagagcattagaatcaaatatttgaaaggaaataagctaggctcagagataaatagtccttgatatcatatatatatatatatattatatatatatatatatatatgtatatatatatatgtgtgtgtgtgtgtgtgtgtgtgtgtgtgtgtgtgtatgatatttaaaaagttgttcccgtaagatggtggttatcaaagatcagtggagggagaggctgaaaatagcacatgctgtccagtggatgcaatgatacagtcaggaagaattaatactggtgttcaagagcaaaacgcaaatatgacatgcttatatgtactgtattccagttacatttttaacaggagactttatgttaaataattgtcttgtccaataggtagcctctgggcacatatggctgcttaaatttggatttaaaccaaaatttgaaaatcttaaaaacgtttctttgtttgtcacactgactgcgactctcaagagccacagatagctagcagttataacagagaaacagaattcttccattgctgcaaagttctattagaaaacacaaggatttgcacagatgtgtccactgatgattttgtagattgggatttgctgtaaaatcaaccagtggagagagaagtcgagcaggtaaggatttaaacaaaacaaggttgatcttgaaggactgacctttgaagttcagtattgaggaagaaggaattatataaccctttctactaaccatatatttacatttttccagccgagaaagttaagacatcttcaacactcttgacaccaaacattcaaggtgtggggtacaccctcctatgaataaccattttctttggaatctttacaaaaaaatgataaaatggtccacatgtgtatgtgacaacattttacatattattattgatacttttagcttgtatggtgttcagtactttgtgattattaaataaaatatctcagagagctttttatcactcatatacattcattctttctaaaggctacttgattttacattgttttgaagtagtcggatgtggatcaatgtagagaatggatcgggaggctcctgaaacttaagtggagaaacctcaagttacctccctgagagcaaatgaatctgagtaagtggttgactgcaactgagaagagcgcatacccacaagcctgcggttaattgcgttttggcaaagctatcaagaacacacaatgagaaaggattatctttttagggggataatctgttcagtagatggtgtttgggaaatggaatattcacacacagagaagaatgaaaacagacccttttctcactctttatgcaagaataagctaaaaaaaaagagagacttaatcataggaccccaaaattaagactactaaaggaaaatgtatggggaaagctctgaaagatggaagagatttcttagctatgaccccaaggcaccaacactgtaagcaactataggctaagaggattacatcaaatggaaaggtttctgatgacaaggaaagaattaatgatagcacacagatttgaagaggatatatgtaaatagtatttcagacaatgtttatcacatctagaatatgcaaagaactcaagagcaagaaaataacctttaatatagacaaaggtcctaaatggccatcttgtaagacaaaacatacaaatggacaacagttatatgaaaagctactccacgtctctcatcaccagaggcaagcgaatttaaaccgcagtgactctcgatgtatactggttattattttttaaaagattattaaagataatgtgggaaaggatgtggaaaggggattctacaccgttgctgatcacataaaacagtgccttcattctggaaaacatgagagctcctcaaaacactaaaagtagaattaacatatgactccgctatctcgttatttagtgtgtctccaaagtgagtggaacagaaggaatctccagactcaaatattcacagcaaagttattcagaatagctaatatacggaaaacttcaagtacccattgatggatgaatggatttatgttttaaaatgttttaaaaagacatgctttcaaaatggaatggaatgctatcatctttaaacaaataaacaaaacaaataggacattctgtcatttgtggcatggtggacaaacctagatgatgttatattcaactacactgggcatggagagaaatctgcatgatctcacttatatgaaaaatcttaagaagctacacttatgtattaagtagagagtagaatggtgggtaccaaaggccagtggagagaggaactgaaaaggggtcacattgatcactgggtacaaagttggttagacaggaagaattaatgctggtcacagagcaaagcactctggctacagttaataatgcaataatatttcaaattgctaaaagtatatttaagtgttttcccaaagaaaggataaacgtttgggatgatggattggacagttagcctgacttggcaattccataatgcatatatatatatatatatatatatatatatatatatatccaaatatcacatttcatctcataaatgcatacaactatttgtcaattaaaaataaaataagtttaaaaagttaaacttaggtggtgtgggggagttggttctctccctatacatttacatagactgcagagattgaactcaggtcatcagacttacagatcaagcatttttacccactgaaccatcttattgtcctaaaatacaactttggagatgggaaaaaaaaaaaaagcagaaatacatcaccagctacagtaggtgaacgctgctgattctgctccttaagtatgaagaatgaatgagagacaatgggcgggggggggggcggggggggctggggggggagagacttgtgtcttttcagtttggatcaatcgcaattcataatggggctaaagggagtaaaccgatgaccacaggcatctaaagtcagcagaaggacggaggcagagacactggcaatacattctgtgatggaaatgaaaagactgagtgaaatgacctctgattcttctggacctcttcccacctccatctctccatctccgaggaatacgcatatagaatggcactgttgccaagccaattccatgatgtactagtgtgtgacgtgcccagtgcttacacatgcatcctttgcaaactcagagagtgatgtgactggggcttctgaaaggttatttggtggaagagggaaagccaggaagttctaattgttattctaatcagctacatcagtgataatgaaggcctaacctgattagtgcaatgggcatgaaaatgagagaacagacttgggggatacttatgctaattaattactctgacaagatccaaggcacataggcccactcggattatctcgctgacagattgtaaaggagagtgaggaaatttaaaaaatgaaactaagtatttacaacagagaaatggctcgctgtcaggatgttacacaactcatgtatcctgttatttcaatttgcttagatttctgactacacatgacttcaataccccatggcttttacttttagatgttccccacacctgtttctgcattctttagcatccggatgcctctcaatctgtcttacattttaactccctaagaggaagtatgctgggttaaaagaagtcattagcaaatataggatggccttgcttttttgttttttgtttttttgttttttgtttttcgagacagggtttgtctgtatagctttggagcctatcctggcactcgctctggagaccaggctggcctcgaactcacagagatccgcctgcctctgcctcccgagtgctgggattaaaggcgtgtgccaccaacgccggctcaggatggccttgttaaggagaaaatatttctactcccttgtaggattcttctgagttggattccaatccttctttagcttggattttgtattatgagtaaaattataatctgttaaagttcaaagtaacctttggttggtttccactgttgccaggtgaaactgctaggtgtctatctcccagaaagtttccagaatgatggatttatcacaatttcttctttactcttgaagtctaaaaaactgagttttaaaatgtgccatgatcgtatacatcactcaagatgaaccacaaatatgcatccacggagtctaatatatgaaggagagtgccaatttatcaatttgcaatgagtaattttaagttataaggacctaagtaattggcatgcaatttacaccttctctccactagaaagactcatcgcatctgctacaagaagaaatatacagtcaagaatccaaaaattaaactgaaaaggtggaagctaaatccattgtaaaagaaaagtagagatggtcaagactgacagtcggtgactggaagtcccaggatgagagtgtacaaagcctacagagaaacaggtacacatggggtgagaaacaatagttgaccctctcatgcagcagaaaagttttttgtgctaacagtaagtatgcagctctggtagaacttggcactagttaatgaatagtacagaacattgagcagtgaaaacaaaagcaattagagctacaggagaagaaacttttcagtcatagaagactatagaggcactcaggaaatgtgtggagcatacttttttaatatctttaagtctctgttcaacagcaacaactggttgccaggtggtggtggtacacacctttaatcttagcccttgggaggcagaggcaggtggatccctgtgagtttgaagccagcctggtctacagagcgagttctaggacagccaagggtacaggaaaaaatcttatcttgaaaaaaaaaaacaaaaaaaaaaaaacaagtgaacaaacaactgggactggaaaggcagctcagttggtaggatgcttatgcacaagttgggcaacctaagttcaatccttggaacccatacagtagaaggagaaaatggactcctaaaagttgtcccgaacatatacacacaacatgatatgcacatgtcttctctctcacacacacagccataaaataataataataagataataatattattaataataacatcaaaagacatcatttacaacataattgaatgataagttattcccacaaactctaaaacacaagtaaatgcaaaactcctagaagaaaatgcaggagaaaaattctgcagtctttggcatacacaaaggttcctaatgatataaaaaatcatgaaccataaaagatggttgtgagccaccaggtggtagctgagaattgaactcaggacctctggaggaatagccagtgctcttaaccactgagccatctctccagccccaacttgacttttaattaacaaaatacttaacacttgacagaaaaaaatcaaaatatccctatgccagtaagcatctgaaaaaatattcagcattattaataaaaaaaattaacctcaataaggtatgactctccattcattagaatggccacaatccaacagtctgaaatgttactagatgaagctcattccattttggaaaagtcagtgtctgaaggtcaatgttggaggagagagaaaggctttattcagaggtcaatggagagagaactagaagcttttgctgacaactcaacttctcgactccagggagatgggggttatagacatgataggaacaatgagagaaaggcaggccagtagagaaaagggatacgcatgtcttttcgtggatattccaggaacttgggtgtcacatgctggctggtaggtgtcttttatacttgaagggtaaggagaagagacaaggcaggtccaggtcaagttagccttgtatcacagttctagatgaaacattgcttagtggtctacatgtctatacacagaagtgactagactctgacccaaacacaaaggtatctaatgagtcagacacagtaagaacgcagagatgcgaagactttgcctctcaccttagtaagccccaaatacctgcaggcccaaggaaagagcagtttcctcaaaactagacttcaagtccctgaaaaacaacctacataatctttatcatcgttacctatggtgttacatcacagcaaagctagtgggaaaccaataacatatccccctgctgtgtaacacccttgtaggggaggctaagccagaaaagagtaaaatttttcttttttttttttcatttaagtaaagggtagcatcattattaagctgggagagacaagaaactcttctggttgggaatctaagaagtatagtatatctatcttgtgggtaaagactgagttgggtctgtgtatactgcttttggagcagatgtggaaactatggcaggtgaattttcagcaactcatgaaaggagaattcagtcagtgatagagaagtcaaaccaagatggtgaccctagcatgttaccattcaagagggaggaataggagtgttataaaagagaaggtgagaaagaataatcacaaagatagatgggaaattagaaggatggttaatgtaaatcaacgaagcaaagagttccaaaccagagaatggcaagacagggtgttctgggaaccacaatgaaggaaggaaggcaggacttaaaatatccattggatgtggccattaggtgggttcaaaagacacaatgtgttgtgtcagagcctgcagattcagatatgtgaaaatgttttatctcagtgactgaagttccttagggctgctaaggaatcctactcacagattccatttccatattgcctagtttaatgacctttctgcaatacgaaggctctactttggattgttgtgctatgcatacttgaattctagaagctcagctatcaacctgttttccctgatgttcctcacaggctgaaacatgaatagagtctaggattctctgttcagaacaacaaacaagtaagatgatgctgggatgacagtttaaagtccacactaatgcttaaaaactcataactgatggcacattataaaaactcaaagtgtaaattaacccaaccttcccccaaactagtgtgagactatatgtttcttcttttcttttttccgaaatagtatatcttttctaaagttttcttgttgtttgcttctttacatttatttatttttgcatataggtcagaggataacttagacaagttggttctctctttccactgtatatgtactgggaccaatctcaggttaagattggcagcagattccttcaccctctgagccatttcactagccccaactattttccaattaacaatcaacaattcttgaggtaccatttccttggacaccttttgaaaattgtctctgagggactagatggttctcagcatattcacggcagctaacaactgtctctaactccagttctggtagatctgatgttcttgccttcttctggcttcctcaggcactgcatacacatgatgtgcatacatgcatacaagcaaaacactcatacatataaaataattttttaattctgcaccttgagggatgaggattatttaatactgggactgagtaataaatatctgaattgaatttaaagtggggctgatttgactggggaaaaggaggaagaagttatgaagaagggaaaagaggaagccatggtgttgacatcaaaggtttcaaaccagagcaactctgtgtatgatggggatcttacatggaagtcttgaagaatgtttctgggaagaagaagaagaaaatgacacatggctttgtgtaagttgaggggtcacatcgtggggaacatggggtcaaaaggaactgttgtgtctatggggttagtgtaggttgagtcagttcatgtagtgactttgtgacagtcagatgctctggcttgaatatgctttatcctttttcaaattcatgttgaaatttggtttttgttgtaacaatgtagagggaagattgtatcatggagccatggccctcttgaatgaatgaacacagctcttacaggactagattatctgctgtagggatgaataatttgaaatgaagctgtgctggttggattttgtcagcttgacatgagccagggtcatctaggaagtggaaacttcagttgagaaaaatgcctccatcaggttgtcctgttagtaagactgtggttcttttttttttttttttttgattaattgactgattgatgtgggagggccaatccactgtggatggtgccatccttggccaagtggtcctggattatatatacatatattaaaaaaaaaaaaaaaacaggttgagcaagccggtaatcagtgttcctccatgcactgcttgagttctttcctccaggttcaggttttgagttcctaccctgtcttccctcagtgatggactgacctgggagttgttaatgaagtaaacactttcctgtccttagttgtttggggtcatggcatttatcacagtaataaaaggcaaagtaagatacaaagccacctcctgtatttattgttcctcacactcacttgcatttctacttttccaccctgcaacactggatcaaaaaagccatgaatttagtaaacttgctctcactataaattatccagtctccattagcccatcatagcaaagaaaacccaggtacaccagatgctaagaaaccagtgttctaattgttgtgtgattattgcagaggggaatgtataatggcaagagaagagctgatctatgaggaataaaactccaatatcggaatgtgatggagatagttaaataagcaatgaaaaatctgaatgagggctgggagatgccagtgtgggtaaaagtgcttgcaacacagcctgactttggatccctggaacccatgtaaaaatgggacatagttcctctgacctttacatataggttacagcatgtgcacatctttatgcaccaacaggtacaaacacatacacacaaataaatgagtactcaagaaagacatagaggaggggtgtaatgataaatctttctgccaagccgcctgagccccgccgccatgtgggcgcctgaaataacatacagagtcttatattaggtacaatacagctagccaatgactaggatttctcatctgctagcttagtcttaattatcaaccataatcataagactttatcttatggaggacgccggcagaatgtgtcctgtcttcctgggatcacatggtaactccagagcagagagcagaaggaagaggaagagagcaacttcctccttgtccctgcttatatcctgagtctgcctgtatgtcacttcctgcctggatcactttactacatttcccagaatcctccttgactcctagtcccacctaacttgttgcctcattggctgaacaaccaataagataaacatatgcagaatgacattccccattagagggggaggaggagaggaagggagatgagagacagacagacagacacacacacacagagagagacagagacagtgacagagagagctgagccatctgggactcctggcctcagctctcaatctcagtgggtcattaataccactgacactcatttgatatctcctgggtgagatggcccgtcagagatataacagaagtgaccactttctgaggaagtcctgggtgagctggtagggaactttaacaatggataccaggattgtaggcctgtatctagttactagattgggagaatactcaagacagtttgaaagcaatatgtgaaagtcaaaaaatcaccattgctaagaaaaactaaaactcttaattaagagtggaacccagcctctttcaaaggtctaggtcaatgcagcagctgagttaatggccaaagaaagaagagaacaggaagcagcagacacaagtaacagatagcaggataggttaggactgaatctctaaatgccaggcaaagttggagccatgtgtgatccctttctatgatcacttggttcctgaagcttggggtaagtctgatggaattgttccagccagcaggagaaaaggaggacaaaggtgaaaggagggagacttgggagtatctctaaggaacttgtgccccaaacgtctgtcacctcaagaagatggaagaaaccaaaaggtacaactaagtcatccattaggttaggccctcctagtgatacagaaagagtaatttccttgtgttagtcagcttcatcctggaatttcttttaggcatggtctgaactctgttacataggaacagagaagacaactgacgccacgttccagggttgagtctgaaaagtaaatgagtctctgcacagaaacaagtccattttagactttattgtggcttttcaaagctgcacagtcatttaattttttttttcattttttactgaaacaaaagcagacatgcaaattttcacttgaaaaaaaaaatgtcagctgagacacaattgtggttctaaacaattctagagaatgacttcatggaggcatcagatgtcccagaagaccaatgtttggtttctgagtccctataaactcagagtcgagaccaccagtgagttgtaataaggttgtcaactcaaacttggatcctattacttgtcagtctttctgctggcaggaacctactggcatactttttgaattatctagctttcctctatgtctgccaaaaggaaaattttaaaggctgaattatggttatcctgcacacaaaaagtgagaatgtgccaaaagactaactttttaccaaggaactgataaatgtttatacccttttcaaaagagaactcaaagatacatacatacatgtgcctaaggaaacaataggaatactggaaacaattgaaaatgacagacacaaaactagatgagagtaagtaaacagattgtctctcagctatccagaattcacttgcacatcatgaattagaatcacttgaattactattggttttctaaatttaaagctacaaagtagttcatagaccatttagaggcacaaccctcatagaatccaataacctggaaggggatatgctaagactcctagttgctacagtcttccataattcttccctccttgacttacctttgtgcatagctctattcttttttttttaaaaaaagattttatttatttatttattatgtatacaacattctgcttccagaagagggcaccagatctcattacaggtggtggtgagccaccgtgtggttgctggaaattgaactcaggacctctgaaagagcagccggtgctcttaacctctgagccatctctccagcccacacagctctgttcttataccttgtgattttaagactgtatctttggcattattttcccataacagtgcctcctagaaattaacccttttatgaatgtggctgtcccagtttgccagatattctgcaagattgctattttattgattgttttttccttttctcttctctttgtgtgtttgtttgcaacatggtttcctcatatagcacaagttagcttgaactctgtgtgtgcttcctgcctcagcttccagactactagggttacaaatgtttaccaccatacccagtatgatttttttctaaatcatttgccccatatcttcctagatatgataagactggttgtgatggtccatgcactgttgctgtacaacatcctctggttgcaagcactgttaaagaggaaactgtagtagacaatggaattatgttgacaacaaatctattagaaataagtagccatgcaattcaggaagaggggaagtactgtggctgggtggagtaagtgaggattagagactattaaatagggttagctacttaggaaattatgatatggttgaaagaggaataatgccctgggaaaataggtatagtatgacagagtagtttgacccactatgaaaagatcaagggctgctgagtactcaggggaggatatggccatccttagtcatagaattctacattctttcctttgtccatagtccaaactaaacacagaaggtatgcgctgtggcacttggacctgctatagaacaaagagtctttataatgcattacatggcctcttggcttcaagaattcagaaaaaaaaatgggactggtatatcaaattccaatattgtttcctttaatgcctccaactttcagcatctgccctgggatggatttcctcatcatttgtcttactgcaccggatttggaatgaactacagctaaacaaataaagcatctctcaggaacactggagccagcacagaggcccaaggcccacctatatattgtctccagtgtctggaggaccacagcacaagttcttgaaagttgtagaagacctggagtcaagtcaaaacaactagtaaccagatttgttttacagtcaaaagcctaccacttggactttgggttataagcagagggaaaggcagtcattttacaataaaccttttgtcctaagtatgttcagtggaagaaactaagttcattggagagaatataaaaagtagaaataataaaaaaaagtctaaagtgatgggggatgtccttttgcatatatatttctgttattggttgatgaataaaacactgattggccagtagagacaggaagagaggcaggactaggagacgaagagaatgctggggagagaggagagagaggctacgaggagacaccttgtagagaccgaaaacataggatgtgccaggcattctccagtaagataaggccatgtagaaatacatagattcgtagttatgggttaataattaagacagagctagccaatacgaagccatagccatcagccaacacgaaagtcctaataattgcaaggtttggcacttgtaacaatttctaattgtattactacccttaaaagtggttctgggctggagagatagctcaaatgtggaaaaatacttcctacacaagcatgatcacttgagttcaaattcccagaacttcactatgtttaaaaaaaaaaaaaaaagctagacatattgcctgagtgttcacatcacaatgctcctccagggagatggaagacagagactagagagaacacacacacaatggttctgatcttctctccctctctccctccctccctctctctctctctctctctctctctctctctctctctctctctctctctctctcctcctctcctcctctctctcctctctcctctccttccccctctctctgtggggtgtgtgtatgtgtgtaatgttttccattaacacgaagcattttattaaaattcactaaactgggaatgtagttcacctagtagagcactttcctacaacgcacagagccccaggttctctccccagcagtatataaataggccttggtcacacatgcctgtataatcccagcacttgagaattgtagccagatgtatcaaaatcatagatagattaaaatagatagataggattaaaatcatagagatagatagatagatagatagataactgcataaataaaggttaaagacatcgtctctttggatacagaactcaagaccagcctggatagagattctgtagaaagaaacaaagaaagaaagaaagaaagaaagaaagaaaggaaactatttttactttaaaaaattactaaaaatggtatttacatgaataaatattagtctgaacccatatctcatatagcattcacaaaatttcattctatgtggatcatagctataataaaaactatgaggctaaaccatgaggtccaagcacttaagctaaaactatgaagacaataaaataatacctttgcaactgaaacaaagtatttttagaacaaaaaaagccactaatcattaaaaaaaaaaaacaggttagattcaccaagctttaaacatcctcttcactggaaaagggtctttttaaagatgaaagaaagaaatgcaagttgagatgtaacgtttttccatagtaaagtattataagtacccaaatgtgctgagttatgtggcaaattggaagctgacctgctatagtgaagtacacaagaaaggaaaacacgttgttctatataaacactgtgtggaaaatgccatgtcttgaacaaaactatttaaagttggctcccttacaagccctccaagcctggaggaacaccactcctgagcctgtgcgtgcccctagacactccccttacactgccctgcaagatctctattctgtggcttctcagcgtctttccccagccatccaccatggtgggtggatgaaaggccccagctaacatggggttagcttgttaaacaactgcaataaagcctcctgctgtttgggaaaaaaagttggctccctcaaaataaagggaagtagcagaattggaagaatataatatttacaattcatagatcaaatgatttgtatatagaatgtatggatgattctctataacagtggttcttacccttccttgtgctgcaaccctctaatacagtccctcatgttgcagtgacccccaaccatgaagttattttgttgctacttcataactgtaatttgctattgttataaattgtattgtaagtatctgatctgcaaccccaaaagggtcatgacccgaaggttgagaaccattacccttgggctggaatatgaaaaggataatctagttttgtcacttgaattcatttcagggtgtggtcaagtagttgcagatagttcttagatgagaagtggaagcccggcctggtctatatatcacaagccttaggccagccaaatgctacatagtaaaagtccctatctcaaacaaaacaggaaaacaaaaacagcaatcacaacaaaagcctgtcttttctttaaactctaatgaaaatgtcttcaggctttgaagaagaaaagagggaaggggatgaggctgaggaaggggaagaggagaagaattgggtggattagtttgccatgaagtagaagacctttgatgggggtgatgggggcgtctacagtcaaggaaaagaataaagagaatgtcaaggaagagtaagatactgggaaaaatcaactcagtacacctaagagttggatttactttactttggctaaggggtctccacagtgagaccctgtctcaaaacaaaacaagatggaaaaaccacaaaacaagcaaacaaactacctgttttgagagtagtggtttttggttggaggtgacaatgtctctctcaggacactaatgatatcttgagccatttaggtctataacagtgtattgtacaatgatgcgaaatgattctatcatatatcagatggaaacagggggtgctgtgaaataaacatcctactgtgctcagggataccttcctacataaacacacttacctgtctctgaaagaatcactccgcccagtgtcagctattctgtccttgagaaaccctgaagttttgaaaaattgaccttaggcaatgatacagggaaagatgttggatttgggccatttgttgaatcctaatagagcttaaatactcttattaggattcttcattgaaaaaaattcatgaaaatatcacctaaaatgttgaaaaagtggaagttctaggcctataagagataaaacttatatgaacctactctctcaattctctttaaaaaatgtttagtttctgaattattttcccacactttgtgtaatgattaagtattgtcaacagaatctagaatcatcctgaagaagggtctcagggcatgcccatggggaattattttgattatgttaagtgggatgagaaggtccactaatgtggatggcacccattcacagggctgtgattgtagactgtatgacataaaaaaagtgagttgagtataggcgtccatccctctccacctcctagtcctgggtggatgtgatgagacttctgctcctgtgcccctgactcccccaccatgatagactacacttcagaactgtgaactagaatgacccctttctcctctaagtggttttgtcagggttgtatttgtcagagacataggaagagaaacttagacattggtaccaagaagtatggctgttgccgtgataaatctgacaacgtggttctgaggccattgacagttttgtagctggaatgtggaagagtttgagatccggggttagaaaactacaggatgtgggaagctttcattgttctctgtttgctgtagacataataggaccagcttaaagcccctgctgccttaaattcattgtcattgtagagctgtgagctaaagtaaacctttcttccttaagttccttttttcggggtattttagtacagtaacaggaaaagaaaccgagacagaaatagagatggcattgggatggttggtgttaattgtccacctggcagaatctagaattccctgggcacatctgtgggtgattgtcttgactgtgttgaggtgggaacacctgccacctgaggatccggaactgcgtgagatggaggaagagaggtgaacacaagctcccatctctgtttcctaaccacagatcatgtgacctcaacctcccgaggtcatgacttctccatctcaaactatgaaaccaaataaactcttccttccttgggttacttttggtcagagtacgtttttttttttttttttttttttttttttttttttttttttttttttttttttgctttgttattgttttgtttttcaagacagggtttctctgtgtagctctgactgttttggaactcacgctgtaggcctgccactactatgtgccagaggtattgaggcacccatgatgcttaggacacagggccagagttcattttctgcccgagtcacaccaatcctgcggtctctggctctctcttcacgatgcgtttgaagaaactggagtctcccgtagaattgcaacaaccaataataatggttttaatgaagtagagatacgaaggcagctggtacccagtggaatggaaaccgagcagagtcttctgatcttgctcaactcggtagtgttatctacatcctaaagaggatggaggaacggacaggataaacagatggcatgcttgtgttctcttaaaaattgttccacgagacaagggaaaatctcaggttcctagtgtaacttcaaacatttactgagcctgaaatagtttgatgcatcttggctccatgatagtgtctttgaacttataccccggtatccattctttctccctgagccaaataccagtttttcacagttgcttccagtcccagctttgtactggtacttaaactcgttatagtctttcagggataaaccacagttttctatctctggcacctaacagtcaagatcatctcaggaggggtaagcaaagatccatgctatgcagaggctacccccgcccccattgatgtgatagcaccttctagagcccaaatgtggtataaagcaaagcctctctgttcactgtctctcagtctgtcttccttctccatcacagttctaggtggccagatggtgaaactgaaacttctgggccctgtaaattgtgtcatctttatcccaaactctttatctcttggcggaaccttaatgttaaacagaatgtggaagggtaaataaatattcagttttccaatgagataatttaactggctatattactaatattattatgaatcatttgcagtttaaaagaaaatatattgcttcaccattcatattttttttaattaagagaatggagtactgtgcatgtattacatgcatttattgtgattgttatttggtcttgtaaaattaaaaatagaaatacctcctttatcttattctgaaaaatcttttaaaatgggggttttttgtggagctggagagatggctcagtggttaagagcactggctgctctttcaggggacccacgtttgatggtgactcacaactgtctataattccagttctaggggatctaatgtctctgtggacatttcattcgcatgatcaacgcacatacatgtgggcaaaacacctacgcatattgttatgtttttatttaaaaagaaggaaaagagaaagctttaagatgagacatgttgactagtttattttatatggacccggcagagtagggagactaagagaagcggaacaggggtaatggctgaccgccatggccggtcgccatagaggcagagagagtgcatgggtgagagagagccaagaagaaacagagaaggagagtagagaggaagcaggaaccagagaagcaggaaagttgggactttcaaagggaagactggacatgcacactgaggttccacgcatgtccagagtcgtcatgggtgaccggtgacatggcgttgacatagcacgttttcttgcgcatgccctaagtattgtcagggggcggggtctgtctcttaaagaggtagagccgatcagcgtcaaagcctgaacctttcacatataacatttttttaaaattagaaaagggaaaacaaggatttctgaaggacttaagaattaacaaagaaataaaataaggagacttagaaaaaaacaaacctctcaccctaagaacggggagaactaacttagaaacctaaccaaggtcacaatgacccgagtccctggaatttcctacctggcagcaataactctcttacaaggccacaagacaacctaactaaataccaagcactctcagagggccaccctgctctgggttcatgaagataagaacagactatcccactgagtcaggagaccatccagccccaaagataagagacctccaaaggacatgtgactctggtcacgtacccaaacccctaaaagcctatggttttctcctataaaagaagcctgcttttgaggaacagggcttcctttttctgtcggactgggaggcccgtttgcgcaaacgtcccacaataaacttacctcttgtttttacttcagctggactggacattgagtgttttgggggggaccattcgatttgtgaagactcctcgatctgagggtctttcatttcctgcatgctaagaaatgtcagttgaaacgtttttttacccccttgtagttagaacacaaatggaaacattcatacgttttgaagtaattttgttattgctgcaaaaaaattaaattccatggatacatgtaaaaagatgtttctctcccacccaccagtttccaaataatcactcagaggcttatattaattacaaatgctctatcaatagctcaatcttattactactagctcttacattttaagttaagccacaatctttatttatgctctgccacatggcagtaccgttattagcgtggcacgttcatccatgtaccgttattagcgtggcacgttcatctcctgctccctctgcatctggctagtgattcctcagactccacccttctcattcccatcatccttagtttggtcgccccacctgtatttcctgcctggctactggccaatcagcatttcattaaaccaatttcagtgacaaatctttacagtgtacaagaggattattctacagcacatacatagccacaaccatcttggaaaaatcttttgtcagcagacataaaacagattccttaaagcaaatatctttaaatgaactcctgttaataagaataaaccagctaagccgtctctgttttagccatgacgaatttacaatagtaaaaggaacattgtcccccactcctttgtgtgtctacaatctacagctttttgtcttccctaactccagattctctgttgacattgtcactcatctccttacctcagatccacccccaaacaaaagaacggaacaactgagacttcatgaaaacctcagttttccaagctaatacggtgtggaaaagtaattttctcaatgaaaaaaaaaattaatcaaattgaggcttgagcaacatgactcaggactacacattcattcgatttattcacttcctgtgacccacgacttcctctgtgtcagtatttatcctttccttcctactaactctgtggtgtgtattctcacacgttcaagtttgatcaccagaaattcagctctttgacattgttatcttaagtatacatcaattttatcctgaatgaaaagtttcagatatatacaaaaacatagattatacaagaaccctctatttatttatcaccccgctttgacaagagtcactcagaactcttacttcatctgtacctctgcccacttccctaccaccaccttctccccccattttttttttcaataaaagttggtgtttgcaattaggtgttgcttttgtcaatataacctacttggtgttgtgttggttcctctgttttctataccagaccatacatcttcgttagtgaacttgcattttaactgctagaaattagtaactgtcacttagtatttaagaatactgtaagtttatcccattattcctccgacatccgtgaatcccctttatcgctcgtctcactcttaaagcaagggtgtcacctactggccagatttaaaatgcggtctccacactggtgatttgagaatggcacctatagactgggatgtttgaatgcttgattctcaaacgctggaaatgttttgggaaagattaggaactgtgtcactggaggtgagctttgaggtttcaaaaggtcaggccatttccagttagctctctctgccttctgctagtggatcaaagctataactcctgtgcgggtctgcctgtaccctgtgatgctccccccgtggtggttatggactcatcctctgaaactgtaagcctccaataaactctttcttctgtacgttgcttttgctcgtggtgttttgtcatagtaatagaaactaagacattgattgaacttaaaattcttaaccatattgtcccagttggctttctgttactatgataaataccatgaccaaaagcaacttggggaagaaagtgtttatctcatattacagttttgcagagggatgctaaggcagggacttggggcagggacctggaagcaggaaccgaggcagagaccacaaagaactgctgcttacatacttgcttcccctgacttgctcagctacctttcttatgcaacacaggtccacctgcccagggatggactctcctccatccataagcaattgagaaaatgtcccacagatgtgcccacgggccaagcaacagaagcagttcctcagttttgattccctcttcccgggcatgtcagcttcatcactgacactaactatgacatgtgccaaataattccccagcgcactgactccttcttagattagttttaagcacagagaaagaggggggagggagagtaggagggagagggggagcgagtagaatcacaaaggaaacaaattgtatgaaaacactgttgcagccaggagtccattgactccagttaagaagccataactgcaaagatatatttatggttcctgtagaaacaactcctttctcttattttgtgattaagaattattattcctgaaaggttttgggaattacattgtacattgtcttcaccattgtaaatattttcatttttatagatttttaaaaggttattgaagacataaaagaagtttctatgcaataaaaattatctacttgggcccagcaagacagctcagtaggcaaaggcatttgctgacaaaactcatgacctgagttccatccttagtacctgcgtggtagaaggaaagaaatgacatctttcagttgtctcgaagtacacacacacacacacacacacacacacacacacacacacactaataatgtagttaacagatttggagaaaaatattgggttatatttctaaattctttgaattctagaaattgtgatggttttgtcaaggagaaaaagaagactccatagagaagctgagaaggttgctctgcaatgttcccgcttcccctgcatgtttttgccaggcctacaaaggagggcagagtacagataaatgctattcttttacacctctgaacaaggtcagcaactgaggtttctgataaagtcccctaggtggactcatcccactagagggcactgtgagtgcaagtcagatggtgcagcaggataaccagccctctggaatgaggaggacttgagccccttccttataaataacccccttgctgggcattggtggtgcccacctttaatcccagcacttggaaggcagaggcactgtgagtttgaggccagcctggtctacagagcgagttccaggacaggctccaaaacaatacagaaaaaatcccgtcttgaaaaaccaaaaattaataaataaataaataacactcaaggaaaaggtacacaaatgacctcaggaagtggagaagagaaaaccagaggagatagccacattgcacaaaatttttctacattcttatcctctctcatttaaatgctacaagtcctagtggagtaggttttattgttccccatttaaaacaaacaaagaggaatttactttatagatcttcctgagttctttaaggactagctgtgttcaaggtagttattctacagcttgagacctggagttattttttaaggggcaatgtctgtctgctgaacggtagaaatatgtgacatccttgtgaaataaatctaatattaaacctgagctatttggggatgagtcattattactcattactccaccataatatactcatctatctacagacctgtttaacttcactgagagccaggtggggtcacgtgacaagggcatctatctggtctgaggtatttttccagaatccaggacttcccggtattagttcattttagtattccacaaaacacttctcagaaactcctcacatccatcaagtgctcaatgtgcttttaaatgcaatttaatttaagaagtcaaatatttgcacactcattcccccaaactgcatttcctaccgatcaaaaaagtatgtaataccgcatgccagagttacagacaaaattccctgcctttgtgaagcttacattctagaaaagacaaataataaatatgatgttaacgtgtgtgtgtgtgtgtgtgtgtgtgtgtgtgtgtgtgtgtgttacagtagaagatacaaactaaggagatacaaggagatacaccagacagagagggcaggtaagttactcctcaaatgagatatatgtatattaaagtttgagaagttctgatataaatggaacaatgaaacatataatgatacagtgtgggataaagagtgggaagtgcccatctaatgcaaaccagctcttctggtaagcaaggaaagagccccaaatcagtttaggtgagggctggtagagcctgacactaacatacaggtacaagaccatagcccatcctaagctttgggggttttgtttgtttttgttttttgagacagggtttctctgtgtagccctggctgtcctggaactcactgtgtaaaccaggctggcctcaaactcacagagatccacctgcctctgtgtcccaagcactgggattaaaggggtgcatcacctggcagcatcctaaacttttatttatttttattttatttatcattctatgtttgttttttgttttgttttgtttttgctttttttgttttgggggctttgttttggggggggcgggttcacgacagggtttctctgtgtaactttggagcctatcctggcactcactctgtagaccaggttggcctcgaactcacagagatccacctgcctctgcctcttgagtgctggaattaaaagggtgtgccaccaatgcccagtgtttgtttttattttaaggcagattctcactaagcaactctggctgtcctggaacttattgtatagaccaggctggcccagaactcacaaagatccctctgtgtctgcctcccaggtactatgattaaaggcatgtagctccacactcagtcccaagatttttttaaccttctattttacacacgagtgtgtatgtatttgtatgtgaatgcttatgtatattagtgtacaattagaagcgaccttgtaatttttaaagtgcttacaacgtaagatattttgttgctatatcaaaaataaaccatggaccacaaaggatatatcagaaagattgcattcacatttaaccaaattaagcctgtttctattccaaaagtttatgtattacttcttaagataaaaataaaaatctaaagctctctctgcctcatattccttagtcattactaagctttgcttcctgtgccaaacactggggcccttacgtcatttcttctaagccttggctctgattgcatccatggttatagatattaaagttcccttccaggtttcactctctttgcactggtgcctcacctcaggcttctgtatgtaattccagacacctcccattcaacttagtttttttgtgtctgtgtgtgtgagagtgttgttttgttttgttttaaagtcccaggggccttatcaagaaaaaagcaagtcgagaactctctctaggctttggtcacaagattcaccactgagatgctcattattcaaaatcaagtggcccctttggaagtaggcagctgtcataccacctcattttgcacatactgatatttgccatggctaggagctttgcaattagcagccagtcccacctttataacatgaacgtgagaggacccagctctgaaaagcataattccccatccttacagaacctccttcatctccataaacctgacagaaatatccactctgtctactccggattctttccctagaagggtacccagcatcccccctgttctttcttccccacctcacccttgacacagtctccttaatgagcggaagctcctacagagcagagaaaactatctccagacaactgctcctttcttataaatggtccccaaggaaaaggtacatagatgaccttgggaaatggagaatagaagaaataaacagtctcatatcaattaatgtaaagtttttctgcattcacactttctcatatttagctgccacattgacccagtgaaatagatttcattgttcctcacttaaaatgaacaatggtctggggaagggagggtgactcagtgcttacagccttgctaggcaactgtgaggactggagttggaatccccagaattcacataaagactaggcatgcatggcagcccacctgtaattccaaactccaaaggcagagatggggccttagggtaaacctgatggccagactagccatatctgacttctctgaatttgattgacagatcctgctgtgtagaataaggtagagtgcaatcaaggattatttcctacaacaacgttgggcctcctcatgcaatgcagtcacacaccgaacccctccccaacatacacacatgacaaatgggggaaaagcatatcgatgttagatcggaagatagatagacatccagacagacagacagacagacagacagacatggaacaaactaggtatccagcaagatgggtaaatacaaatacatgtgctgctacaaacctgatgatttgagttcaattcctagaacctcaaggtaagatccattcctgcaaaatgtctcctgacctccatatgtgaactttgacacacacacacacacacacacacacacacacacacacacacacaatggatgccatttatcagtattgaatttcatttttactcttggtcttttgtattcaacttctgtgtccattattaagaggatcttatgttccccgtgttctttcatgttagaggcatcttctcatttactttcctctgctgcgttgatccttaaagactgaattgaagaataataatagttcaagaaatcaattagtatgctttaaattttatgttgagagctgggtgttgtagtgcactctttaatcccaacaccttgggaggtggggggcagaggcaggcccatctctgttgactttgaggtctaactggtctaaataatgagttccagatagtcagagctacatggtgagatccagtaccaacacctcccccaaagatctctgttgatacaaattcaaatataaggaggaattctgggtcagccatagaatttctgctattatcacttgtcacaggtgacaaaataggacttgaagtcctccaccatagctaggaaattatctgtggggagctgtcgacatgtaggcaaatataattgttatgagtcttacagattttttctggttgcaatggcttttaatggacagaagtaggcactgtggttctttgaccctcccaatctaacagcagctgacccagacatcactgtcttttcaggtctggctctgttttaaactaagtgacttatggggcagtttcatgctgtgctggaaggagccatgcaggaggttgatggctctgaaactccaactttacctagacaggttctggatgctcccactggggcaacgaagactcacactcaagtcaggcaccaattgtcctgactagaccattacttcacattccccatattttacacaagtgttgcaaaaacctcatcactcaaaagattcaactgtacaaaaatatgtagaataaataggagtgtccttttgttactggggaaattggggctctcttttcatggtccttggtcatcagtgaaagaattttaaaagggactgagaaaaaaactcttgcacagctttattgaagcttgagagaagaactaggtgggtcatcagaaactcttggtgggtacccagaggaggagagtggagaagaggaaagccacaccttttgcaatgcgtgttggcaagcagctgcatggctgcaaggtgggctttagagagagggtaagaaagccatgtgtgtccaggaaagtatgcttaggctttcgggaagtgtaagaaagaaaaagaaaagaagaaaaaggtaggcatttttacttctccagctctgtcatctaaacacacatacagcttgtcttgttggcttgggctggctctactccatatctgccactgtcctcactgtttgttcagtggtcctggcatttcaaatgtcttggaatcccctgtagcacaagtaataaaaaacccagagacagatattggggttcaagctgaagatcagaaaagcaagcggccaccgctaactcttatctctactttagattgaaggggcgatcccatctccaagaatcctgtgtggctggagactgaatgtcttgagactgaatgctgaagaccgaataaccgaataagcccctgagctcctgtcttatatacctctctagtgctgggattaaaggtgtgtaccaccactgcctggcctctgtggctgtggttagctttgcactctgatttttcaggcaagctttattatatcataaaccaaatatcactacagtctccaatgtaattggagcttcacatacatatacatacctattcatatacaggcacacatcttaaaatgtcaggtgtattatgttgtataattttaacagtggccacaggtcttactattaatgattccccttaggatacagagtaatgcataaagaaagtttaaacaaataaaatatttatgaacacagttaacaaatagctgcagaatataaccaaaatcacaagacattgaaataacaagattatatctaatcgcatatgactggcagataaaaaggcagttttttgttttttgttctgtttttttttttttttttttcaatacagggtttctctctgtagctttggagcctatcctggtactcgctctggagaccagactggccctgagctcacagagatcagcctgcctctgccccccaagtgctgggattaaaggcatgcgccaccaacgcctcaacgcctggcttggctttggttttttgagacaaggtttttctgtgtagctttggagcctgtcctggaactcacagagacccataaaaaggtggtttttaaggtagaaaaaggctctggtataggaaatctctgaccacataccagtgcaatatatgaagttaactagagttttgagattaatagtggccagacagcattagagtgcttgatttaatgaaacccacgatggggcataagtcaatgagtggagtgaaataaggggagcaaggatccttgtgcccttgaatttcctcctggacaggtgatcagtgtcaaaaccaatgtgaggatgggtggcctacagcagagatttccccactttgtggtaacccaccaacttgatggtagcactggtgtatttgaaaaatgctttcatttctgattttctttgttctgttactataaaaactcaatgaaactactgcaatatcggtacatggaatttggagtaacctgaacctgtattcccaagccacagttactctgggctgctgaataaactatcaattattccctcagaggtgagaggtgtgtgtgtgtgtgtgtgtgtgtgtgtgtgtgtgtgtgtgtgtgtgtgtgtgtgtgtgtgtgtgtgtgtgtgtttaagggctgtaagaggctgctgcttccagaaagaagggctattgttgaggcaacccagagaaaaacagaaagaacaagaaacaatccctttcctgaccctgcctcttttgacattgtccagtctcttgaggttcttgttggcagaagccaacagagatccagctctgagtggagacacttgttagacaaacctaaccttagcatcagagaacaaattatacaaatatagatggatatgagcttaagacaactggcaaatggcactttcagtttaaacagaaagtttaaacaatgatttccattggcttcggcctaaactccctatttaaaagctcccaagtaggcttcatctaatggtctaatgcctcttgaggattacctggatccattgtttcattcagtgctgttgcagaatagttctctgactgaggcattctttttgcattgattaggtggagtctgtacagagaaacattccctcaccaactatttggttgatttaaattacaatttgtgcaggaaaagacaggggaaacttgattactgctcttagtccattttcagagttgctggcttaggaatctaaagatgatcagtggcttagcaagttttgatattagaaatttgtcacatttgttcataattttgattctcttttaatctattgtaggcatttttctcttttatattcaggttgtctcattttaggccatttaaagtgttcatggcattttcatgacattttgttttggtttgttttctgtatttttcttatttgttctggattattcttgaaaaaaaatatcatgcatgatcaacttaattctatccctttcattttactctaaatttctaagtccttcagtgaaattagtaacttatcctgacctttccctgacttggcaataaacaccctaattgtctggtgttgggttactctggggaaatgatcttgagatgccctctccaccaacacaacaaagctagagttaattacagaatttaaaattgttcaattgtaaccaaattggcaagccaatttagggtattatgtacacttctcatatggggaaagagaaggacaataacaataaaaaattaactacaaggtaatttatccaagaagtcataaacgattgccctaaaacaggttcaattttgctcctactgttgaaattacaagttgttttatcatgtgggaagcagtgagagaacaaaatagaccccccaagattcacctttttaggaaaagctttttcctcccaaatagcagtgtttttttttaaatatatataaacactgatttttattattttagaaataaatagactggcaaataacagcacctcaaaccagatgaccagggaaactcttgggaagatgttttagtctccttctcgtatactgtgcactgctttgttacctctctggtctttgccttctttcccgccatcaaattcagctactgaatttagactttctggttaaccaaactaggtaattgaccaacataatgtctctattctttatgcatccgttttcctgttcatgcaaattgctctaaaacttgattcatagcacttgattaaaatcttgtcacctttagggaaagaacccacgtttcttagcatggactatgatacccttcatcatctggtctcgacttatctccctgtcttcctccttgctgacccggccctctcaggccccacacctaatgcttgactctgaaacatgggcagagagttctcacagtttgcttcaaggcctctgtatttcagcaagttgttctcacttgttctctctctctctctctctgtctctatctctgtctctctctgtctctctctcctctctctctctcctctctctgtatctgtctctctctcctatctctctctctctctctccctctctctcctgtctctctctgtctctgtctctgtctctgtctctctctgtctctctctgtctctctctctgtctctgtctgtctctctctctctctctctctctctctctctctctctctctctctctctctctctctctctctccccaaatggttaactaagagttcagaagccagttcggacgtcacctccatctgagattcatgtcacccactctgaacatggactaataggaataatcaagtttcccctctcttttcctgcacaaattgtaattcaggcccaccaaataattggtgaggggatgttcttcggggcagactcccagttgatttgctctaaacctcagtgtgttaggcggttccttagtgccatggacagaattattagcacactaattccttatatgacatctactatgtcccataatcgtcttcgtgaagttgctctttgtgtgtgtactgtatgatgggcttatgtgggtgtgtgcacattgtggaagtcagaggtcaacttccggtgtcttcctaaatcacctcatgttattaagaaagagcctctgaccaaactttgtgtaggctgacactgagctctagagatcttcctgtctcttcctgccctgtgctggggtatacatgtgcagtggggttttccatgggtattgagatccaaactcaagtactcgtcatgtttacacagcaggaactttatcaactgaggcatttccctagcttttcttgtatttaatttttggtgtccagcactatgcttgctatagctctggtgaatattttctgatggaataaatgtatgactgaacagtcttaacagcatttcaaccatttttcactttgcactaagttattcatactcccaacataatatcactgcaccaaccttggcattgttagtcatttgcattccaaacacagcagggggtctgccattgcatcttgctgtagctttaataagctcttagtatgctaatggttgtagctgtaaggaaagcatttctcccacattcgttaacatttcctaaaactgcagatgcaaagctttttgcagccaaactttttctaggagcagtaagaaaatcattaagtatggtacgaggtgaagaactacaggtaagatcttaggatcagaacaaaaactgatttgatgcataattctcaaatttgggtatttatatgaaaacctactgtgcatattcaaattatatatgctgggattacaggtttcagaatgctagtttagtagtttggaagctggtcctaagtgatcttgatatggcccactatcaagaaacactattcagagaatagttgcatattacaaattaatttaagagaccatctatttggtctgtcatcttgttaatgtgaaaactatcatttctccattttgtgtgtacatgcaacagaattccacgaaactgaaattcagactgcttggcaaagtttaagacagaaaacaataattgaaggtctttgatgatgttgcaaaagcaagagtggttatgggcgagttctgtggcgaaaagggtgcactctaaggaaaggtagaatttagactcagttgctatcttgggcaagtccttcagtctccccggttctccatttctcacctacaggtagtactatttctatccttatcaacctcatagaattatataagggctaaaaatgagtataataactgctaacactaagatctgatcacagacagttacactttataattaaggttttaaatgacacacctgcctaaattaagacgcctagccccggggaatttgttctgagggtaacttttgcagcttcctattaaagggtaattaagattccaataactgaactctgtcgtattgcagtttagaaacacatgtaagggaaatcttgagtgacaaagacacaaagttaatagaagaccaggattgaagaagtttattactccacatcatttccaccatacttacttagttcttcttttctcatctctattataatccacattacttcattggatgtggtagtggggaggaaatcgttatcctttaattgagcttattttgcgaacagctttattgtggtatcactcatataccctgttcaccaattcaaataatagaactcagcatttcttagtaaaatggcatggcactggggaaccgtcctcactatcaattacagaacattttcatcaaccctcaaaaagaaatcccgggacagcggaccgcagttatactccatgcctcccctactccatagcatcggctaattaaagtccgtgtagacggcctatttgagatcttttataagaatcagggcatcgtacagtatgtaggctcttcgggcgagtttctctcctcctatctccttcccgcctctgcaggtgcacagggatcgggaaacacgagatacccccggtattctcccggctccgtcataacggtaaaaccccgatcccacccccacctcaccccccttcacccccacccctactcccaccccttccagcgttacccccgcgtcggtctggggagcgcgccccgcccatccccgccgtcgcctcgttgacgtcactgctccagccgcagactccctccctccttgccggtcgcggtagctttgacagggcgcgatggcggcggccgggtctgcagggttgccggcgaccgtgtcggaaaagcaggacttttaccagcttctgaagaacctgatcaatccaagctgtatggtgcggaggcaagcggaggaagtctacgagaatatcccggggctgtgtaagactacgttcctcttagacgccgtccgaaatagaagagcaggttatgaggtgagacaaatggctgccgcactgttacgacggcttttgtcctctgggtttgaggaggtctatccaaatctgccttctcatgtgcagagggatgtcaagattgaactgatactggctgttaagttggaaacacacgctagcatgaggaaaaagctttgtgatatttttgcggtgctggccaggaatttgatagatgaggagggcactaaccattggccagaaggtctgaaattcctcattgattcgattcactctaaaaatgtggttctgtgggaagtggcacttcacgttttctggcactttcctgggatttttgggaaccaagatcgccacgatttggatatcatcaagaggttgttggaccagtgcattcaagatcaagagcatccagcaatcaggacattatctgctagagctgcagctgcgtttgtccttgctaatgaaaacaatattgctcttttcaaagactttgcggacttgcttcctggaatcttacaggctgtgaatgattcctgctaccaggatgatgattcggtgctagaatcccttgtcgagattgcagataccgtacctaagtatttgggtccctatttagaagatactctgcagttgagcctgaagttatgcggagactcgaggcttagtaatctgcaacgccagctggctctggaagtaatagtgaccttatccgaaactgcaactccgatgttgaaaaagcacacgaatattattgcacaggctgtgcctcatatattagcgatgatggttgatctacaagatgatgaggactgggtaaacgccgatgaaatggaagaagatgatttcgacagcaatgcagttgctgcggagagcgcactagacagactggcttgtggacttggtggaaaagttgttttgccaatgaccaaggagcatatcatgcagatgcttcagagccatgactggaaatgtcgacatgctggactgatggccttatcggccatcggagaaggttgccatcagcaaatggaaccaattctggatgaaacagttaactcagttttgctttttcttcaggatccccatccaagggtgagggcagctgcctgcactacacttggacagatggccacagattttgcacctagtttccaaaagaagttccatgaaatagtgattacggcgttgttgcgaaccatggaaaatcaaggtaatcagcgtgtgcaatgccatgcggcttctgcccttgtcatctttattgaagactgccccaaatcgctactagttctatatttggaaaatatggtaaaaagtctacattccatcttggtaattaaattgcaagagctgattcggagtggaactaagttggccttagaacagcttgtgacaaccattgcctcagttgcagatgcaatagaagaaagctttgttccatattatgatatatttatgccctccctcaaacatgttgttgagcttgcagttcaaaaggaactcaagcttcttcgaggaaaaactattgagtgcattagccatgttggtcttgccgttgggaaggagaaatttatgcaagatgcatcgaatgtgatgcagttactgttgaagacacaatcggacttaaatactatggaagatgatgaccctcagacttcttacatggtttcagcgtgggctagaatgtgtaaaattcttggaaaagactttcagcagtatcttccactggttatcgagcctcttattaagactgcctcagctaaacctgatgttgctctcttagacacacaagatgtggagaacatgagtgatgatgatggctggcaatttgtaaatcttggagaccagcaaagctttggaattaaaacctcaggacttgaagcaaaagcaactgcttgtcagatgttggtttactatgctaaggagttaagagaaggatttgtggactatacagaacaagttgtgaagctgatggttcctttgttgaaattttattttcacgacaatgttcgagtggcagctgcggaagccatgccctttctcttggaatgtgcaaggatccgtggcacggagtatctttcacagatgtggcagtatatatgtgatcccttaatcaaggccattggaactgaacctgatacagatgtactctcagagataatgaattcttttgcaaagtccattgaggtgatgggagatggttgtctcaatgatgaacacttggaagaactgggaggaattttgaaggcaaagcttgaagggcactttaaaaaccaagagttgcggcaagtaaaaaggcaggaagagaattatgatcaacaggtagaaatgtctcttcaggatgaagatgaatgtgatgtttatattctgaccaaagtatcagatatcttgcactcattatttagcacttacaaggagaagattttgccatggtttgaacagctacttcctttaattgtgaatctaatttgttcaagtaggccatggccagatcgacagtggggattgtgcatatttgatgatatcatagagcactgcagcccaacctcattcaaatatgttgagtattttcggtggccaatgctactcaatatgcgagataacaaccccgaagtcaggcaagctgctgcttatggactgggtgttatggcacagtttggtggagacgattatcgttctttatgttcagaagctgttccactgttggtaaaggttattaagtgtgcaaattccaaaacgaaaaaaaatgtcattgctacagagaactgtatctcagcaataggaaagattatgaagttcaagcccaattgtgtgaatgtagatgaggttctcccacactggctgtcatggctcccgctgcatgaagataaagaagaagctattcagactttgaattttctctgtgacctaattgaaagtaaccacccagttgtgatcggtcccaataattccaatcttcccaaaatcatcagtataattgcagaaggaaaaattaacgagactattagccacgaagacccctgtgccaaacgcctagctaacgttgttcgacagatacagacttctgaagaattatggttgcaatgtatatcccaacttgatgaagaccagcaggaagctttacaagaattactcaattttgcttgaagcactttactatcacttgaatatcagctatcataaaaataactacaaagttttgtgagtggatccttacaaatgagagataccatttctctctgctaagcagttcatacttcaggattagtgttaaggtcttctgtttattttgcatgtgtcatctcttaaagaaactgtggttgtaacttgtgcttccagtcagttgtcctaagagttctctgtcaccttccccctatttagtgtaaatgtatataaatcattgctatttgtctgaacttttgatgctgggtaaacggtatacttggtgccaagatgtctgtgactgtcacaagatgtaaaagagctcataaagaaagggaaacttccaggataagcatctttggaattgagggtcgagtatattggcagacttactcttccttggtactcttccttggtaatacttctgtttgttatggtactggaaggatgctagacctgaaaaagtttcaaggtactgcagtggatgtaggagtttttttttctataatataaatgaaccttttcatgtagaactcctgtaaaggggttggagcatgactaaattccaatttacagggtgtccggttgagaggtacaagaatttaaccaaattggtctttaaaaaattatctagaattgaaatggtgtggaggaggaagagctgatacatctaaccctgaaagcatgggatagacttgaacagagcttaataaataatagtcaatgtttgtgggagtccgttattgttacatgttttagctgagtgtttatatgtaatacccccctatcccccacactaaacaagaaaggaaacctttattcagaataagggaataaatagatttctgttttgaagcagttcttaacagattctacagaaacagtgaaacaaacttaatttcatctttaaacatttaaaaaatgagctttaagactagtcatgtatcagtgtattgttttacaaaacaactctgaatttagggttaattgtattaactgaaatgtctttactgttgaaggtgttttgtagagtagaaaaaagtttctacttaacaaacttcactcaaaacttacaaacaagaatgtctgttgtgatttcctgagcctgttgtgttgtgtatgtaatggagcaaatatgtcagacccagtaagtgctcaataaagtgtcagtgttactactgttggttgttcttctactgtgttctttttcatgctttagaatttggtttacaaatttccctccctactaggtctatctagactactgtagacagggatataaagttagatttttagatagttcagaatttgatatatagtatggttacaagtgtatttaaaataaatagctagctaccttgaagtttaatagttttctgtgggtggtgggattaaatggcaacttttctataaattaaaattacatacaaacaacgtatttctcatataataaagtgttttttttgtaaagttcaaggacctcatttactatcattttgacctcttcatgaactggagttaaggttccttctacttactgagctctttctctgtgtggcctaagaaatctttcatcagtatgttgcttgcaggtcatatagtcttgtgaaactggcaaatgatttgtaattgggtacttggagttttgaagtaagagagagtttaaatttgaattttgatttttctaagtgtttgtttccctacctgcaagatgaggataatatgttgtttatgtggtggttgtcttaatgaaaggagacaatgaatataaagtgctaagcagcagaagggtcagtaaatggaagctattgtgtgagaattttgaaataggtctggtggctaaaagggagtgggcatttgcttgagtttggtaggcttttagatgcttgggttttgtcaaaggaaatgaaggaagcccaaccagacatatttgccagttgctgtagtagaactggtccttaccttttttcctcatgagctgaagtatgtctgacagagagaaaaccaaaaatgccagatgagtacgttatgtgtgaaggagagtgtaactactctaaaaactcatgttcttgtttcagtatttttgctacaaaagatatatagctttctgaactccctacaaaaaaagttttaaggcactacattttatcagtcctttaaacgtctttatgcagaagtaaacaatcttgaaggtgagatctcaaccatttataaatttcatgttcaaattgcacttctatagtttcgattttatgtatcattccaagtttcaaacaagtaagtctgaatatcacatgcattagaaaacagtaataactattttggggctcattaatttccccctcattttatgcaacgtgaactaatgtgaatgatgagtccactttttttagttactttaaaaataaaaaaatgtagcaagattgttaaagtcacaccaatgacaagctgtacagcttagagtagaaatatttggagtttttttgttttttttgtttttttttcttaagcgagattgcgttctctttagccgaactcaagaatccaggtgtttatcggttttaacatttcaatagaacacaggattcggtttttaaaaaactgttaactgggagctggagtttcgagaactagagctctacaatcctccactcttgtgaagtccttaaacttcctttctaatctttcccaaacgctagttttatgagaaaaaaagaccggcggtcacaagggaggacgggtgcaaagatgctagtttacaacggagaggtttacttttgtgcattctcgtacctaggtcacctagcggatgctttgagaaaactaatattaaaatattttttaggaccagtaagggtctcccaaaagcaaccttgatgggctacccgagtgtgtgcagcgcgcgcaggcgctctgctactccctccgcccctcccctcgcagaagtccgcatgttgatgacatcattggcccgcctccggaggccggcggtggagccaagccctggctttggcgtcgcagggcgggacgaaagggggcggggccacttgggccactacgcatgcgcgccgcgaatggcgacggcgctcctttctttgcctctctacacagctctccccggccgggggggggctgagtgccctccccctttcctctctgcccctccccttgccccccccccgcccagcggggcttctaactgacagttgtcgccgggcccggtccgtgcgccgcctcctcctgcccaggtcccccgcaggtagacaggggcgggaggggtgtgaggagaggaggagccggagccgcggcggcccggtgctgcggcccactcgggaaggaggagagcccctctcactcctcctcgccccctccctgcgccccgtcggcccgggaggggtggggcgccaggccccgccggcccggccggtgagcgggcgagcgggtgagcgagcgagcgggtgagtgagcgagcgagcgggcggcgggcgggcagggtgcggagggcgaagccggcgcgggcctcgcgccgccggggggaggggaggggagaggagggcacctaggctctcctctcccccctcccccgcgcgccatgtaaccccgccccgcgggcgcgagcctgagacccccgcgcgcgcgggtcccggccggcggccggagagcgaggcccgatgcggcaggggcggcgcggcgcctcggagccctgaggcagcggcccgccggtgctcacgcttctcccggcgcctcgaacggtcgctcctctcagcccagcctgggcctgccgggggacatgagcgggccggagacgccgccgggagagatggagcgggccgcggaggaggagcggccgcccccgacggccggggacggggacgggaacgaggaggaggtggcagcggcggcccgggcctcggggctggaccgcaggaggagcgcctcctcgctggacgacgaggaggaagaggtggcggaggcgacggtggtcgcgggcggtggctgcaaggagcaggacctgacctacgagctgcagcagggctaccgcatcctgggcgagttcctgcaggagaagcaccgcggcctcaccgcccctttcctgcagcccttggggggcgttgccgccggggaagaagacggagccgaagggcggcgcaacgggggccggggcagtcgcgtcctcccgcagcagcccggccagggcatgtgtctgttgaagatggaggagaagttctcccgcggccagtacaggggcatcaccgagtttgtggcggacttcaggctcatgctggagacgtgctaccgcctgcacggagtcgaccactggatctccaaacagggccagaaactggagatgcttctggagcagaagttggcgcttctctctcggtaagcgagccgggtccctggtgggactgacagacagacacacacaaacacacacacacacaaacacacccgcacacgtgtccgaggaggggctgggccagggcctggggggcggcgctgataggtgctgagttggtgctggcacctcgggaggaggagcagcgctgggcgcgggaccggaggggtgtgatgggcatggctggaagggtgagtgcatccacggagaagccgagaagggagtccagccctaggaaccccaactctcgggaccaggtagataggttccagacgtcagagctacgcgagtggggagagggaaagccttttgtagcatggaagttgaacccgccactcgtatactgttttagcatagcatttaaaacagcatgtagggcgaaatgcctttagaaaaataattttggctcgcgtggaaagatggttaaaatttttatcttctatcagtttcagccgttggaaatttactgttattaaatgtttccgttttatctgagaaagttaaatttttttcagtgacacgaaatgaatgcatcaacacaacgtatttcataagtttagacttgcatggatgtgtgtgtctgtccgtctgtctttttcttcttccagtgctaggtagaacagagggtttcaaacatatcagataagcactctgccacggagttaagcacccagccttagaaatttttttattctactagaaattataggtaattcaaattgtgccatgcttttagtatacaccatctgtatactcctccccttttaggaagagaaaataagttaacataggacactaagactaaggtattttatacaataatcactagatagtggacatgagcccagttacagtaatagaaacatctttaaatattaggaatgttagtgaaggtggaatttttattttgtgtgtgtgagagagtgtgtgtgtacacttgcatgtgtgggcaaatgctcatgaagcagaagccagaagaaagtgtctggtgtctgctgtcactctccaccatgtcctttgaggcatggcccctccatgaacatcatgcttgcattttcctatagattggaagccagcaagccccagaaagcctcctgtcttcctctcctttggagctgaggttatgggctttttccttggtaatgggatctaaacttgagtccacttgattgggcattaagggctgctaattgctgagccatctctccagcccctggaataggagtttgactatttattagttgaatgaactgactggcttttttgacctgtttccttgcctataaattggggacagtatcatcttcagaaaattgctgtgaggactaagtttaaaaaatgaagtcaatactgttggtcgtgtcactcaatgtattaatcacaatagtgcaagaaaatgaatattgcctcaaatctgaacctgggcattgtatatatgtaaaataatgtatctttcatttgtctttggatgctcatttactattttcacatttattgctgactaatttcactaaaagagtaatatagtgagtgcttagctcattagaaagcaaattctctttaaactaaagtttttgcattcttcagtaaagtagaattatttggtaataggttagctatttacaaattagctttgtagattaatatttttattgggtgatttatattactgtgcttgttactcatctttacagtgcattgtggcaaatgtagtacatcttaaaaaacagtctattcacatgccatcattttaaaaagctttttaaaaaaaaagattatttttagtgtgtgtgtgtgtgtgtgtgtgtgtgtgtgtgtgtgtgtgtgtgtgttcagttgtccttggaggccagaagagtttgtcagatccactggagctcaagttacaggtggtttgagagccacctgaagtgagtggtaggaatcaaaccttggtcctctgggagagcaggatgtgctcttaaccatctgagccatctctccagtcccacaggtcattatttttaaatagctaaatataccccaaactgatgtcacaggattttaaacacagaaggaacagtagagttcttgtagtccatctagttagacagatggagaaacaggcatgtagaatgagatagatagctgcacggaagttctagaaagtaacatagagatatagctaaactgtagctatttccaaattactgtgcatataacaaatctttgtcctccaaaaaaacaagttatttttttctcctttgtataaaaatttataaatatcattatgctcagtggtttgtgctcagaaatattcccttgtgatctaatagtgtctacttttagaaattaaacttacaatgttgtcaatttattaaattatatatatctgattaattagccaaaagaaataaaagtcttgcattttagtagcaaagtaaaatgataatctcaaatagataaatatttgagtctctcatgtttttgtaacagtatttgatgtatgcaaatattttataagtgctagactatatttgtggatactaaaaaaatttatattagcttaaaatctgagtcataactgaataagtgttttgagtgggcagaacttggtgaaagctacagctgcttgggatataagttagatatataaatcttttctagaacagtattctacagactgtgtgtgtggttatgattttcaggaaatagatgactttgtgaatatattaatgtatgctatgttagtaattaagccagtttcacgtagtacttgttttcatttgtcttttgatctgtatttctcagacatctacttaactattactttcaaatggtaaagatgactttaaagttgctgcatatgaagctggcagaaaggctcagtgggtaaaggcagctgctgcctgagaacctgagtttgatccctggaactcatgtggtacagggaggaaactgattcctgaagttgttctgactttggcttgtggggatacatctccttccataaataatgtaaaaatttttttccttgagctgctacacatactgttgagctttccagcaagcatttggtggggtacagtagataaagaggatatcttattattattagagaacagcctagtagtacaggtgctgtgaacatataacaaatctcagtttcttcatccatacagtgaaaatgttaggctaccttagttaatggtacaaatatttctctagttagtggagttaggcattgtccttgaaaacatcaaagccaagagtggtggtaaactcttttaatcccagcatcaggaggcagaggcaggtagatctctgtgagttggaagccagactggtctgcaaagcaagttgcagaacagacaggactacactgagaaaccctgtctcaaaaagaccaatgggggtggggagtggagggtggggaggagggcaaagaaatgaaaacatcagctctttgtccctaagtggtatggaagcatttaaagtaataattgtatatgactgttataataattatataatgaatatacaggccaaaaatttagagaaagttggcttaaagttaagagagaggggagagtagggatgacaggtgaggggaaaaaagacggggaaagagtaatttaagcttcaggagggtgtatacttcaagtgattcttaaaggagttgaatcatgttcttggatttttcaggagagttatatagggacactccagaatggtaaacttcagtgaatgcaaagtatgacagttctagaaaatacaaacaattctgtatgctttagtatgggtctaaaatcatatctataccacaggaaggtatgtagtgtgatcatccaggaagggaggaaaatattagaacctgagtatattcaattgttttggcttgtgtctttttggcatttataatagtgctaaacatagaaacctataaacaaaatttatatgttactaagttgtttctttcagatgtaagattgagactcaggtctgttcttttaatttctaaaacctgatttgagagagagagagagagagagagagagagagagagagagagagagagagagagagagacttattttgagtagtttaaccgctcctaccaagttctgttatcttcttttatgaaaaagtggaaggtttataggcgctcaagagaatccaaagtatagaactgtttagtaatagaatttggacttgtctcttgttcagaactatagaatattaagagtttgatattgcatataattctagttataattgccatttgttttagaaaagtccctaaaaatgtttaaatgtgggatgaaaatagaagaactcagtaagacatgtattgatccctatttccaaaaaattaaaaaacacatacacaggtgtgcacacataaaaggtaaagcatactctgtgattctcaaaatagctccattgacagagcacttaaatggcataattctatataaacagcacactgaaattttgatgtagttatatgtcacttgctttttttctgaaggatctaaaaggcttaagacaattacagaaagaagcccccttatggaagagagtctatctagaccttaactgtttttctactccaaattgagaaaagcaattacttgatggaggttgattggcaaatcgtggcttagtttgtaaattgtaaataaagtactcttgtgtgttccatgggagcatatttcaggaatactgtgatgagctgtgttctaacgtgttagaggtatgtagagttggtataactactgctgttggggcagggatgaagtttaaaccttactgtattttattcaatacattgtagttttgagtttgatgaaattgatctcattgaataagtatttgagcagttgtatactagatcgtgcataaaatcctcaagataggttggtaaacgttgtctggtttcttcaggtagataggtgaagaaaacacagatctagagacagaagaatacagtgttggatgagggtaccaaagcagaatttaatatgagaattgattttctttatcagtcttttgggagagagaaaaattatgaaagattgtgattaaaatgagtataccatatattaaaagctggacagcttgataggaagcagtagtgaggctagaaagagtgtattatgataccaatagaaggtattattttcagtactgtacactgtattgtctaaagtttctgttttaatcgaaaatacttgagaatattgtagatttcatatagcaaaattgccttggtagaataccgtatgttttcctttgtaacctgtcagtatgtttgtaagttccagtactatggacaaatacctaagaaaaacaacttcaggaagaagtttattccattttatatttgtagtttagctttcagatcatttttaagctagcttcttaaaattagaatcactcaaataatataattttcattgtccataatcttgtataatattacaagtcttcaaagttcttattaaattacctgaggtttgtttgttttgctttcattgggaaagattaataaatctcagtggtaggttatattatctacccaagcctttaactatatggtctccgacttgagactagtaagtgttctagaattactcatgcttaggtctcaggatattgaggagtgtatatactttgaaacatggaaaatcaacaaaaataataatttcggttattgccaggtagaaagttgctagatttccccacacacaccctctttcttttttctttctccagagtctcctaagtgttataagctgaccttgaattcactgtgtagtcctacagcacatgcagtttatgcagtgctaggagtgagcgccaggacaggctccaaagctacacagagaagccctgtctcaaaaaccacatatatatgatatttataattttgaataaactatataggtaaaaagttgggtttgaatgaataatcagggcggtaatatggcatgcttagagtaggtatttgtaactacacagtaagactgggtgtttaatttgtctttctattcttaatttttctgcagaggcatgtatatagtttttttgtctaatttcatgctaagaaaaaggttttctagatgtagttttaacgatttagaactagctagtagggctagagagatggcttagctgttaaaggctagacttgcaaccaaaaacagaatagctagtactaaggattgaatccaaattttactgtctaaagttttgagtacagacatctgaaagtatttccagctagaaataactcttctgatagtgtttttatgcctttataaatgttagtgagtcttagagttcacattttctcatttcatgttgtgaaaatattaaaaagagtgagtatagaagacaaaactgctttaccttataaatgttgctcatctgtgaggtttgacttttgtgttaaaatcagtgaaaagcagtgcagggcgtgtttgaactagtaatttagaacatgaaatgtgcttgggatcttcttttcccaaaggatagccctcttcagatacatcccatttgctaaggatgaaatttctttcaaatgatagcatcctaatttgtaaaatctacagctttagtttgcaaaggcttgaaggttagcatgttagcaactgaaaaaaatttctaatctatgccagtctcacaaagacaagttatcatatgattctttgtttgtttgtttgtttgtaggatggtggggggcatatcatgaaagtaaaagttggattactaggtgtgtgaaaggctggagtcagaggtgatagggcgaatatgatcaagttcactatattcctgtttggaaatgtcacaacaaaacattcttgtacaaaaataatatttaagaggaaaaaattggggtggagagatggctcagtcagtaatacctccccagaaaggaagcataaggacctgagtttggaactccaaggctttgtaaaacctggattatggtagctctgggagagaggtggggagatacagagacaggcaggtcccccgggctttctggcaagccagtgtagccagatggtgagctctgggttcagggagagatcctgccttaaaacagaaggtaagaaagggttggagagatggcttggtagttaagaacacttgttgccattgcagaggacccacgtttgatcccaagcacccacgtggtggctctgcaaccatccataactctagttctagaagatccagtgtccttttatggtcttcatgagcaccaggtatgcaccctgtgcacatgcatacatgcaggtaaaacacttgcacacataaagtaagtcttgccaaaatagtaagatggagagatggagaaagacacccagccttgatctctggcctgcatatgcatgtctgcactaacttatacatacacacaaacatgcacacatgtacaagtattttttttaaagaaattaaaatttattagcatagtaaatgacttttgtggtagcatatattctcatttggttgacattaaaaaaaaaagcttttccactaaatatgcactcagaatactattttccaaggagcacttcatatgtgttgtgtttattttttatgtttatttcttactgtatttatttgtatgtttatgtgtatgtgtgcatatatacacaataacaagcatgtggaagtcagggaagtcaactttccatcatgtgtgtcctaggaatcgaactcaggatgtcagatttacctgccaagcactcctactggctcatatttttgtttttaaattgcttttcagacaggcatgaatactcaagcccataatttcagcacctggaagataggggtagaatcagctgttcaaagcctgctaggctctatgaggccctgccctgaaaaacaaacaaacaaaaaacctaaaatactctaccagacttggtggagcatgcttagatcctagtgcttgattgtggaggcaggtaaaaatccaaaggactagaaaacaacaaatattttcttttactaagtaaataattcctagtgagacagttcagaatattttctcaggtttgtcctaaaaagaaagagcccatttcatttacacagaaggcaacaggctatttaatactttctcctgcagttacaaaaacatttttgatgtatctgaatattttaaatttgaagataaaaatgttagaaaataacaaaactgaagacatgtttaatatttgctttgaatatttgtgcttgtatttgggaatatactataaatatatttgctcctgactcccttattttcttatctgatgctacccatatctagaatttcctgtttttcttaaataattttcctcttctgggtcattatcaatttaatgcactttgttcttaatagatttttgttttgttttgcaacctagcacataatgtcattcagtttatgttatatataaatttctctcctctcagaatataaattatgagcacagggactttttctgcttggtttgctatttaattttgtgaacattcacttgaaattaaaaagtaggtggctctttaagaacaaaggaattctgtaatttacttgtcaggttgaaaagaagctccatactttcttcctcaaggaatggatacagttttagaaacttcaagtttgaagttaggtcagcctgggcaattgagtgagaccctccctacctggggtgggtggggtagcaattgcttctttgtgatagctggtgggttcagctgtccatattatagaaagagggagggagcaattaacagacagacatacagagacagacaagtgtgtatatgataaaaagtagtatggactggagatgttggtatttgcttttgataccaacatttgagaggtagaagcagggggaatctcaggtttgataccagtgtgagctatgtagtgagaccctatctaaaaaacaaaaagaaagagagaacgtagtgtatggttaatgtgggctacagtctagactgaataaaaaggagaaagtgagctgaagcagcattcatttatttccctctgcttcctgactgtggatccagggtgactagttagttgtctcatgttcctgctgacatactttgcctgccatgatggactgtaccctcaaattgtgagtcaaatatcctcatttccttaagttgctttggtcagggatttcttcacataaataagaaaatagagctgctaatagagctgctaagaaagaaaaaaaccatttaactaaatcagcctgactcattaaaaactgagtagatgctatcaacaatgccatgatttgtaaagaactataagttaaaacctttagtatacaaaatcccagtaaaagtttgaagttacattttgacatattttaacactagttaacatttgtcatcactgctacctagtttgaagagctttatatacattgctattcccgtagctcttaagataattatggaaaggccagagagatgactcagggattaaacactctagctgcttttgtagaggatcccagtgcagtctgcagcactcacatcaggtagctccataccatctggaactccagttctggaggtccaattctacctcctggcttctttgggcactgacacacatacggtacacatgtgtacatgcaggcactcacactaacacataaaatctttttttaaaaaatgagtagttttacaaatgaaaaaaaaatggggcactaaaagattaatttgccaggctaattagtggcctgtatatgactgcaggtggtttggtttaaaagctagtgtttaaccactgcactgtgttgccaaaagaggtagggattgtgacaaaggtgtctttctacttctagaaagactggggaggaaaagattataaggaatttcaaggaacaggggccagttagtgacctagagttgtaattgacagtatttgcaatattctttaaaaaaataaaaaaaaataaagacataggcaaggcatggtggcacatgcttttaatcctagcacttgggaggccaagggagatgatctctgagttcaagagcagccttgtctacatagtgagttccagactagatagagtatacaaaacacataaaataactaagaacgtgatttaaatgtatctcatgtatgttaaataattagcaatccaatgattaatgtttacattgttaattgttcattaatttaagaaatggtatgtgtatctgctagcaaaagctaaatgacataagaacaaagtaaaattttcttaagaagtcttgttgactagggaattgacttaggggataaagtatgagctaagaatctcagcacccagataaaaactgggtgtgacagtgtattcctctaatcccagtactgggaagcagagatggaggatgctgaggagtgcaacagaccaaccagtctagccagttagagagctccgggttcagtgagagtcctgttttaaaaaataaggtggaggcaataagaaaaacacaccagatgtcaacttctgccctccactttccttcacacaagcaatggcacttgcacacatatgtgtgttgcacacacgtacacacttgaataagtaagtaaatagtatctcttttcaccagtcatagggtctcttactgttttgaggccacaattgtttcctaaatctaattggtatctaataaccatttcagacatgttcaaacctgtacttgtggcttgttttgttgtgttagtggttatagttttactgttgctaagcctttttcaagtttctttcacttcatttatttcccttattaaaaatatcaattatgagattgagtgtttgtcatgttgcttaagttcaagccattgtcatttctagccagtagtttcctaatttctcttctttcctttgagttcattttctgtccatcagccattaaaatcaataagtactcttacagataagtgcttcactggcattttgggtatattaaagagtttaactattcttcctacatacctgccagaccacctacacaccaacccaccactctttccattatttggtgtttgggtgagtttgctgtggctctagagtgaaggtcaggggacaagctggggatgtcgattctctccaccacatgagttctggggatcaaacttgggtcgttaggcttgacagcaagcactttacatgctgagccttctcaccacccctaaactattttgcacctcatggactttgtacttggtcttttattttgagcatatattcctaaggtttttgtttatttttgctatgttgattttgctttttgcatggttggctcccctgtcacttcctcagagaaattattcttgactgaactaagagtatataacttagaacttacatatatgtttgtttactttgattgtatatgtctttactatagcagttgtaccagtacccagccacactacataaagcatctaactaatgctgaatgaaggcataaataaaatgaaataaaaatgaatggatctaagatttgttagtcaggaaatgaatttgaattccagctgttttgttattctcatgtgcagccaattgttacatcacttttctccattgatttgaaatgctatttttatgataacatctgtagtgtaagatcatctgatgctgatctttcttcattcgttgatatatttatttttgtgactttaattttatttgtgtgtgtgtgtgtgagagagagagagagaaagagagagagagagagagagagacagacagacagacagacagacagacagacagagacacagagactatatacacatgtgcattctgctcacatgtgtgtggagaccagaggacattttgggtgtcatcctcaggaactctgcgcacctctttttgagacaggcctagagtagctgaccagcaagccccagggaccctcctgtctccacagtattgggattacaggtatatatcgccccacccagattttcttacgtgggttttcacatggtcaaatttaggccctcatgtttgcaaagcaagtgctttttactgattgagccacttctttggcccctaaaattctgtactatctggtaacatgagtcttctgccaagacaagttgcccaccccccagttagttgcttttcttctatttttctataacaagtgtgtcttttaataactcaatggattcaacatttgtaaaaacccatatgttggcccattggcacaagaaatatatgagaaaaccacataaactgctggtttatagagaatagaaatggtattattcccatttgtgaaatgaaagatgaaaagaacagttgaagcattaggtgttttctgtagatatcacaatattcaatagcctcatcctcttttttttttttttctctctcttttttgtttttagctttgctaggttcctatatctttgttaggacttgttaccttgttagatgttggcaaaggcaaaacttgatgggttttcctgtgtgtctttgtgctgttattatctaaatctgaaagcttcctaaatttataatctgtttcagagccttgttgagaagagccagggccaggaagctaaggtatctgcctgcctcaagtatcttttggatagcaccaacataattgtacaatgagttattaactccttagtaatgagcttgtttatgttctgcctgcactgagacctcttgaattattctgtgtggcaaggaatagctctaagtagtagtaatatatttggaagagctgcctgccctagctaactaaaaattaaacttgttgaggttggtaaggcactttccaaacacatttttatataaaactagagaacatttttaccaatgaatcttaaattcaaataaacaaaatcaagacatagttttattctaagcaaaatgtgtgtatagttttaaaagcttacagtggccagtcttcagttttgagtactattttgtttatctgctgctgtttcagaaaatgcccaaggcacagaaatgtttagcttgaagagtctttgcagttagttcctactcaagttgtctcaactttgactaatgattgaatgctctctcaatccctggattttactttgttctttttcagtctacttagaaaattacgagtttaggtcacttaacaattaaacttttggttccttttttgcatttttaagttattccttaacccatcttttcagtgttcttttgctgggtttttcccttgattttgtaggtaattccttcatttatgcttttagagcttatatttctttatttatttctctagctacattacctattttccatggcattacttaccataagatttctagatcaatattttaagaccttcccttttaaaagtttgtttctgtccatagaacttttctagttagttatacaactgccacttcaaaaatgttaactatttctaactcaaatttctttgttttccttttggactttccggatatttaggtttttgttggcgttgtctccattgtttctatctaaatatatcaattatctttgatatatatacctttaattgcatatatacagattgtcagtatgttcgttgttgaatctttattgttaagcagatatctgaatgaatttgaattgtatgaatggatattccctctacttttgtatccccaaaagtcttaattgtgttaagttacagctaatgatcttgagaaaagagtgaccataatgatagagagcttgagtaaaatgaaaactgaaaaatagccctttagtttcaaagcagaagcattgggaagaatggcttagtggagtatgttcgggcctttgccatgttctagtagattgaggtgtaaactaaaggactagcaatttaggtttgaatattttcaaggggagtggctgtttttaatcaaacttgggcatgattttatgctaaagaaatgtatagaagaactcatgaaatacaaatattgaaaatctgtaccttgattggttttagaccagagacatttttactgaaacattatgacatgcctaaattcattttgctttgcattttcaaaagcagagattagtggatatcttacttaggaactacctttctaaattctagtgggtgatagggtgaagcttttacataataatggcattagaggtggctgctgtggagaataaaagaggatgtgaactaccttcaaaaacgtagtcttagtataggttgacccagttgtttatagctagataataaaatgcaaggttttgttctgttattaacatcagtgctttagtagtagaagtatatgagcagagggactttaggctaagacttagagatgctaaatgaaagagaaagatcattggccaagggcattttgagttgcagcttttttcatgactagtgaaaagaagctgaattatcttgtctcgactttcatttgctctgacatacttttctggatgagctgagaatttcaaggggagtaagaataataaccaaggaaacaaaagggaaagaacagtagaaaataagtaatagtttgtggttagtgttttcttgcagatgatttttttctgaaaaaaaaaaaaccaaaaaacttggatatcaagtagtttaaagatgaaagcagtaatctccaaactttttttttatttttagcatatattatttgcataaaatgattggtttcaccaaaacattttcaggtctctaaacttttatagcctgatctttggaggagagggggaaatgaatgtgtatactatagtatgcttatatttatttataaatggcatgtaagaatttctctaagcattaatagtacaaaaattattttcatgagagcattgtgatttgtgtgtcaaggtttggtttaatacttggctgttgagatacttgaaaaacatcttttatgctaggtttatttggatactgggttttaatgattggtgcagttcagagcttataaagatactcaaatttagagtacactgccagctgcaatgactacattgcttatctatcaaatgtgcctaagtttttgttgaagtccctagtaaattctgtcttttctaatttcattcagttgttcttgaaaactaatactcaggttgtgctatgctgttagtcatcatatgcttctccaaatgcattctccacccttgtatactctgctctgtgccccaggaggctgatttctaaggactgcatcaactggtctgccttgtcccctgacttctgattgggttcagccaatggaaggcactgacaggaggacggagaggtaggagtatttactttaacatcttcctctttcctggtcttcaggttgtcagtaactatgcttagtcattgtgtggctctcttctttagttacagctctcttggtctagtaactattccccgttcccttctcttcctattttaggcttagaatgggaataactccttgttgtggctgatgcaggaacacttcatcatctcttcctagctttctcttagccttgcctgcacatttgtaaatagtctttgcgttgtcactcactgtctttttacatgtcctttcttgctaggaacttggggcttagttatagttgaatttttaatgttttttaaaatgaactgagttaacaaagtgaaactttcatatagcatatgaaagaaacattagataatttcatttctaggttataattacagagagagagattgtgtgtaggtgtgtatgtgtgtgtgtgtatgtgtgtgttgagtaaacacagggcctgtgcatgctaaatatgttctctacttttgaactctacttccatacaaatagttgtactattaatgacaattcacaatgcttttaataataacaaccaaaaaactctcacataataatggaaacattcctaaatatctgtttttaagaagaggcagtatctgtgttgattattagtaaatatcaagcatattagtttatattagttttaagtatcaattattaaacatcagttttcttcttgttaatacttgtttcagtaattgtaagtagaattagtctctgaattctgagattcagaatgtattagcataaacatttatgctttaaaggagaaaaaacaatagaaatgatgtcacctataattgttgccaaggctttgtgtatagttggcattatattgttttcaaactactgccattgattttgtgaaataatttttctcatatgaagaaaagagtttgggttgttgttttatttgtttttaaagggaagactcatttttaatgtgtttatatagtccttgattataggacacttgctgttttgaggtgaggtgagattttttttaatcttagtttatggcattttattctctaatgaataaaaaccaaattacatgtttaatcaggactcttaccatgggcaaagacattgattgacgttttaaattttaaatatatttgtaactgaaaaatgtgaaaaagtatggcttatatcattgggaagatttttaaacatgtctgtacacacatatgtacacatatatacatactatggttgggggacagaagtacagtgaataaggggagaaaagtcccttatattcctggacccttccttctggttggggctagataattatttttttaattgaaaaaaatttcatacaatatattttgatcatgtttatccccttttagatcctccctacctccccacaaacccaattttatgttctttttccttcctttctctttaaaaaaaaaaagcaaaaatcaagaagcagacacacacacaaaaacccatacaaaaacagaaaccaaattatataagcaaaagatcataatacaaaaaaatgcccaaacaaagcaaaatgagacaaaaaggtctaaaaaaaaaaaaatactattgaatctgttttgtgttgaccaacttatcttgggcatggggcctaccctgaagcactagcagatatcagttgcagaaagcttcttggttgggggtgggagcctgtagtccagttttctcctcagtgttgggatcctgtctgaattgagcctgtacaggttttgtgcatgctgccagtttcttgtgagttcatgtatgcttcagtcttgtgtttcaaagatactgttttcttggagtcattatccatcacctctggctcttacagtctttttgcctcctattttgcatagatccttgagctttttgagggggtcaagtgggagggggatagacaattattaaataaatgttcattaatactgtgtggtgataagtaaaataaagacaaaccaatataagagcatagagctgttattaaacatcatgatcagagaaaaacttctcagatttggtggcctttgaaacatggttgaaatgacagacctgcacacgaatatctgcagaagagtatattcttatgggagaatggggcacaaagattctagagaagtagatgtgttggtgtggcttgagaatagatggaagtctgactggaatgcagagagcagaagacttagaaacactgaaagggtaaggggccttgaggtaaggaccatatcacattaggtcttagaggttataagaatgtcaaatatattctaagtataactggaagattttggaggagacagtaaggtaatgacctactccatgtaactgttaaaagtattgcacaggtttctgtatcgatagagcagaatgaaaggaaaaagccttgtcatgggcatttgtagtagcctaggttaagagttaggattcatgtatacacaagcacacatacttctagatgctgtttatatttgtgatgtttgtaagttaaatatatcttactcaaaaacttttttacacttagctacaatgatgtctttttcaatgtatgtacatatacatacctggtcttattagatgaatggtttatattctctggtacattagttaatgtaatatgggccttggagatgggtcagcagctaaaggtacttgctaccaagtctagtaactagagtttgttccttggcacccctgtggggggaaggaaagaaccaactttctgaagttgtcctctgaccttcacattatttattgcctgtgtatacagacaataaataaatgtaaaattttgtttaacggtagaaagaatatactgacacttgaaagcaaccctctaatctctataggtgtagtatggcatgtgccccagcaaacaataaatttaaaattttaatttaaaaaattaattttttagaaaggtaacaacagcttgaaatagcacaccagatgagcccaaattcttcattattagaaaactaatgttcttatcctatgagaagctaaatcagttagtgccatctccttgtaacagaaaacaaaacaaaacaatagtatggtaatttagtagactctattcatgggatccaaatgtcagtgaaggtaagagtgataagttatcctaatttataatcgtaaactgatgtgaacacagtttaagaagggaaggggtttgattgtatctcatagcgtaaagatttatgtttcagtgaacttttttacagtttttagggaaacaaggaactatatccacagtcaacatttaatttatataaatttttttttggcgtgtggtttatgtgtggtttatttaaatagagggaatgtatatttatgaaggacaagtaagaagagagcttccaaaagtgggaggggctccaagggaggaaaatcctcatataaattattatgcagtattttgagtggttgattttagagctgacttgagtttgtcattgtagtaataatgcatgaaattttcagaggatttggcatattttacaaaggtagaagagatgttttccctgaattttttaataattactgtttatataatggatacaggtctagaaatcagtagttagactatcctttaaaactttgcagggtcagtgtagtgtttccttttctagtgtaaatatgtttttattgacttttttttttttgtcgtactgtagatcattcttttggtcttatgcttgctgcctctgagctacatccctaggcctattataatttttttaagtcaatccaaattcattaaggtgatttgtgcacaattaagtgaactgctgggatgctatttttaaccagtatctcaatgaattaataaaaatatcatgaaggacacatttgatattaagattgaagggaattctagagttctaaattctgaattttttcagtcagaagacagattgcatcacattgttcattcattttttattaatatgttctctttcattagtattgataagtaattaatatttggtaaaaacacattgaaatgaacctctacttcatttattcagggtttgttattgctaggcagctgttttccttgggccttgtaattccttactctcgggacaaatgtaatataattgctatatattgtaatgctgcacttacgtataatatccccaaagtgtttattaccaaaatcttctttcccaaaacgtttttatgtcattgtacatttttctcatacatcaataaacagtatgataccttgcaagcaaaaactttctattgatgtttttaatagaattagtgttttagtccttaatttgaatgcttcatgctgatactttttaaatgtagaggagggactgtccctcagtgacatttatgtgaaagaagttagaatcttgtgtggaacagataaaactctggaacaaggcaaagaaactaaatattttgtagaagtcagcaaaagaggttctacttaaggtactggtgaaagggtgcattacttgtccggaagatttgaccttgtgaattgacttgttcttctccaaggcacttgagagaaaagacaacgatagcagttacatctagaggctattatggattggaggaggagaagggaactgcatgtacttcaacaaggcgccggtcaacacctcgaagtttgacaggtttgacaagtggagtgtttgagtctataatggttcaagttttgagacaggaagaacagctgagagcaaaagaagaaaaaaggtaaatgttaaaatgttaactgttgagatttccaagaattacttttggagaatagctgcatttatatgccaatatcacattatggtcccattttagtagtagtcagcatttagtagatttagtagtaatacactgtcaacaaaatatgaattgttaatgagtcacagagaacttttctcaagggaacctcagattatagctatttttatatacacaccattcagttattaccaactccagaaataatgatgttcaagaatgacatagggactggaagcacttgctgcttccacagaagatccaggttcaattcccagtacccacttggtagctcacaactgtctagctctagttccagggaatccagtgccctcttctggtctctgagggtaccaggcatgctcatgatgcacagatagaatacatggagtcagaacacccatacacataaaattaagaattaaatttagatttaaaaatgacataaataaacctctgccatttcctccagtaatatttttaacttcatgaataactgcttgttttagattcttcagaaaagagtctttcagttagtggtaccttttgtgcccatgaacatagagtgatgaccttatatatcatttggaaagtagagccctaagaggtaaatgaaactcaagcttctgtaatttgctagtgattttacaccaaatcaaatctcagactatacatggaatgtttgctgataaaattaagatttgctaacgctagtggaaggcaacattttgttgctcttatattaataaatgtaacatgctttgataattgtagggctaaaactcagccatgatactttcagcaatcataatttttatagcaggattaatttgcaaaacacacccccccacccttgtttagtgccccagagtttttctgctataggaaatgggaattttggggaagaattaaaataaacctgataatagtacataagggattaaattagaaggaaccaaaaaaatcaaaggctgatggaagaaaactagttactagttaccagaaatagagagagtgtgttctgggaagaggtaacagaacttaatgccttccttgatacaagtagagcaaaggaagaataaaaaaaaaaaaaatggagcacagctgggtgtagtggcacttgcctttaattccagtgttcgggaggtgaggcaggtggctctctgtgatgtttgaggccagctgtagacagtagtaataatactgtggtaacaaggaagaaaacttttgagtatagtatttatttactgagacagacttagctcttaacatttgtaatcgacttgtatcatgagtcacagagaaataaagtagtttgcccaaagtcacacagtttttgagtgactcttaagcctgtgctgctaagcagtaaactaccctgtggtttgcaaaacagccgagatagcaaagaagctgtaagtttgggaatttgagctgaaagggaagaaacaatgaatttgtctaaaaataaagggattaagatgataaatgttgaagtattcaagtgtgaatgtatagtgggaagttagaatagttccaaatcatctttttttttttcagccttacatgtatttatgttacccttgccaaaaataaacatagaagtataagccataggagaacattgtccgttaaatgtccccatgcaccaccacacccaaatcctatatgttttcttacttaaatgcaagaactcattatatattcaagatataagttctttgccaggtaaatatgacttgcagatgcttcttcaaatgtgtccttcaaaatgtgtccttctgggcagtggtggcatacacatttaaccccagcacttgggagaggcagaggaagatggatctctgtgagtttgaggccagcctggtctacaggacagtcagaactgtttgttacacagaaactgcgtctcgaaaaacaaaaaaactgtgtcgtacctttctgttttcagtgtttttcaagaagaaaattttacctttgacattcagttgattgagtaaaaacaaaaacatattatggtttttgtaacctgtataagaaactgtaacataactggggttatgaaatttttccttcagtatttctttttttttttttttttttccggtgtttctctgtgtagctttggagcctatcctggcactcgctctggagaccaggctggcctccaactcacagagatccgcctgcctctgcctcccgagtgctgggattaaaggtgtgcgccaccaacacccggctgaaatttttccttcagtatttctaagtttccttttttatgattgtattcagtacctaattaaaattaacttttggctgtagtgtgataaaaggataaaactagtttttccattactggtagtcagttatgctaatatcacatattgtggaaaaaaaactatcctttttatactgaattctctatgcatctttattgaagttaattgaatatatatttgtgagtcattctgaagtcacttatgtgtagatagatttatactactactgctttaatttgatgactgttttatttgatactgttattgaagagtgctatttatttaaggctttatatagtaagttttgaaattaagtaatgttagtcttctaactgtatttttattattttcaaatttgtactatgatcttttcttttccatgtaattttagaacactgtaaatttctttacaaaacaataagtctgaggaaattttgattaatattgcatgggtattactgattaatttctgggtaactattttctttctctcggcaatattttgtattataaatcatttaaacttgtagttatgtagaaatttgtagtcatgtagtgtagtgaccttttgtctgtttcttaattctgtcagattgagcttcatgtaatgtaagttgttactacatacttgtaatttttaactataaaatcaacttattattgtacaaatgagctgagcatggtggtgcgcacctataatctcgcacttggaagatcaggaattgactatgtagggagtttaagggtcaacatggtctatatcagatcctatctcataaaaccaatttgggctggggaaaaggcttagtgggtaaagtacctgctgagcaagcatgtgtacctgcatttgatccctagtgtctacataagcatctggctgtggtagcacacatccagaaccgggaggcagagacagggttcccaaggctgtgccactcagccagtcttaaccagtcagtcagctctaagctcagtaggagatcctgcttcaaaataagttgggaagctatagaggaagacacagggcatcaacctctagcctcaccatgcacacccctcacacactcacacaggcatgcacacacacatacacacactgtttggtttttcaagacagggtttccctgtgtagctttgaagcctgtcctggaactcattctgtagaccaggctggccttgaactcacagagatctgcctgcctctgcttcctgagtgctgggattaaaggcatgtaccactactgcccagctttaatttttaaaaaggaaaaaaaggaggaaaattgtaatatactaccatactatgttgacttaagtgatagtgtgctgtcatctgtttggattgatatatatataaaaaaaaaagctctcccacaaaatgtgtatttaatagactattatttactcactagcatttcatgttttcattaagagatggctttctccacaaagtaagataaagtgtctggtgagatggcacatgtcttttagtttcagtgcttggaaagcagaggcaggtggatctttgggttccagcccacactagtccacatcgagttgcaggacagcagggctgcaaagtgaggcctcagatcaaaaggagcataatagaagaaaacagcattgacttcttgcctccaaatgccacaggcatataccatacacacctaaaataaaagtacattgtacgtattgttcagtttggtttttgagtattttattgaatactgttgtatgtgtgtccatcaagaatgttgtcttttgttttctttttgttgttttgttgtgcttttatcagttttgatatcagagtaagactggctttgtaaacatgaatttggaagcatttcttccttgctgttttatgactggtttgagagagtagtttctggtactcaggagggagttatgaaaaggttgttttgaaagtacaacatttcctattgaagggtttcactcaagataaggatggagccaaaagaataaaataaatactttctgattagttcccagaggtctccattgatgaactcaagagaacctagaggataaggttgcctgttgataatctgtactgcaaagggtgggttaagtgtagaggctatcaaaacatatttggtatagcatctttaaattgtttatatctaaaattaattacaattgtatggacctacttcttaagactcagcattactacagggcccctttttggtaaatggtattatcatctattaaattatgcaggttagaaatctggggttcatcgtggaaatttttctattttcttacatacatttcaaatacaccccaagattctgatagtttattccccaagtatcttttatatcaatatgtgtcgcttgtttctgacttcagctagttcttttatctctcactttaactgatgagattgtttcttaattgctttaacagcatccatgctctcctcattctagtatgttttgcagattaaactacattgtgggctgggaatatagctaagctgataaatttatagttagctgtctttatgaaaatgctgacaggacagcaggaagtctgggctagctggtgcagtgaaggctttttgatttaggaaacatcaacactattagagacttagaaaattgagttagatctagttaatttatggttgctaaactaatcttgacactatcccaaccactttattttatttctaatggtgactttgatccatttaaagaatatattttgtagacctcagttattgaacaaaaaagtatataattttttcaaaaaataaaatttgttcaaaaggacatgactctccttacataaattctgttagtctgtatttttattattttttgtgtgtgcttgtttgtttagtttctttgtcttatgggatgcaggttgagatcccaggcatgcaccatcttactcagtacagaagatgacattatcagatagtagttttgataccctaattgtattaaaaatattctcacaattgctttttgtaaaatttaatatttgcattaccagaaactatatcctttaaatattcattgtttcccataccttaataaaataactcatattttgatttggaaatcgtaactaaaacagtaagtggtttctacatttttgtaaaataaaaatcatgactttataatctattttcaaattctctaacaaaaaatagtagtgcaatttagtcaccctgtatttgttctgtagctttccagacttttactaaatccccgtacaaatcttgactttccaggaaaaaagccaaagatgttatattctcatacccactcacatctgaggtgagggtgtgggatcaggtatatatttctcacatggaactgtatagacacaacatgaagcagcagtctgagataggagactttgtatcttggcaaaagtggtagtaggagtttttgactatcctaggttcttgttttcagaaatgtgaaatactactggaagtcttaattctttggagaagtatatagatatagttgaggttactttgcggctcttttaaatttgtgtctctgaccctgcaagggcttctgtaagttccctactaaatttttagttcctttttaactgtgagactctgttgtttagcatacaagttaaaaaacttggctaataaatttgatatgagtgactagtattcctaaaatacaatatatattacttattttaaaatgcagatcttttagctttcctttgtcatgctgtcagtttacttatattgtagtgtttcctaatggatgatgtttaattggaacttctatgtttttttttctagattgcaaactcttgagaaggggggattgattttttttttcttccttcatttatagtaagcattcactaaaagtttgcaaaactagtgaggatactttcaaatgtgatgggggtgaggtaaagccattcatccttagcagtgcttttttttttttttttttttaagcagtgctttttctaagtcatgaattcatggttaaaataacactagttagaatttctgttagtatttcatacagtagcaggtaaatgttctccaggcctataaggaacaacaacaaaaagctttatctagaaagaagaaataagggccaggttttgttcatttgatttttaatgagtgattgtcttttactattatgatcctccctcaaacagaaggcttagtatcttcagttaacattctaaaaccatgtactacttttttttatttatttatatatgagtgctctgtctgcgtgtatgcctgcatgccagaagagggcataagatcccattacagatggtcgtgagtttcagaaattaccatgtcactcacctaataaccaaaggttgcttaacactgctttaggcaactgctttatttttttatctgcttaaatttccttttttattctgctcctaagcactggttgcttttctttccatctctttagaaacatgtaatttttctctatcagaacaaagagtaatgcattgatgttagttatttatgtattgcccccgggagactatgatgcttttttgttccctgtctctactggttatcatcatcgttgttttactgttttgttttcttatcctctattctgctatttaatgttcctccccttccctttctacccatctctttctcctaattccctctccccttcccccatgctcccaattagctcaggagatcttgtccctttccccttctacagggtaccttgtttgtccctcttagagtcctccttttttcctagcatctctggaggtgtagattgtaggctggtatgtctacatgcttcgctctatgtctaaaatccatatatgagtgagtacataccctatttgcctttttgtgactgggttacctcactcaggatggtttcttctagttccatccatttgcctgcctatttcaagattccattttttcccactgagtagtactccattgtgtaactgtaccacattttctttatccattctttagttgaggggcatctaggttgcttccaggttctggctattaaaaataatgctgctatgaacatagatgaacagatgtccttgttgtgtgaatgtgcatcttttggatatatgcctaagagtggaattgctagatcttgtggtattctgattcccattttcctgaggaatcgccatactgatttctaaggtggctgtacgagtttgcactcccaccagcagtagaggagtgttcccctttctctacatcctctccagcataaacagtcattggtattttttattttagccattctgataagagtaatatggtatctcagagttgtttgatttacatttccctcatggctaaggatgttgagcactttcttatgtgtcttttagccattttagatttctctgttgagaattctctatttagttctgtaccccactttttaattggattatttggtgttttggaaactagcttcttgagttctttgtaagttttggagattagcactctgccagatatggggttggtgaatatcttttcccattctgtggtctgtcattttgtcttgctgactgtgtcctttgccttacagaagcttctcagtttcaggaggtcccatttattaattgtcgatctcagtgtctgtgctacaggtgtaatgttcaggaagctgtctcccaaaccaattcgttcaagagtacttcccactttctcttctaagaggttcagtgtgactggatttatgttgaggtctttcatccatttggacttaagttttgtgcatggtgaatctatctgcatgggtctatctgcagtcttctacatgccagcatccagttatgccagcaccatttgttgaagatgctttctttattccattgtatgtctttagcttctttgtaaaaaatcaggtgttcgtaagtgtgtgggttaatatcagggttttcaattcgattccattggtctacctggctatttttgtgccattaccaagctgatttcaggactatggctctataattgagcttgaagtcagggttggtgatgcctccggaagttcctctattgtacagggttgttttggttatcctgggtcttttgtttctccatataaagttgaatattgttctttcaaggtctgtgaagaattgtgtcggtattttgatggggattgcattgaatttgtagattgcttttggcaagattgcccatttttactatgttgatcctacctatccatgagcatggggagatctttccattttctggtatcttctttaatttctttctttaaagactcaaagttcttgctatacaggtctttcacttatttgtggttagtgttaccccaagatattttatgttgtttgtggttattgtaaagggtgatgtttctctgatttctttctcagccctcttatcatctgtatatagtagggctactgattttttttttagttaatcttgcattttaccactttgctgaatgtgtttatcagctgtaggagctccctggtagagtttttctgggtcacttatgtaaactatcatatcatcttcaaacagtgaaagtttgacctcttcctttccaatttgtattcccttgatctccttttgttgttttaatgctctagctagaacttcaagtacaatattgaagagatatggagagagtggacaactttgtcttgttcatgattttagaggaatcgcgttgagtttctttccatttagtttgatgttggctgttggtttactgtatgttgtttttattatgttcaggtatgctcctgttatccctgatctctccgggacctttatcataaaggggtgttagattttgtcaaaggctttttagcatctagtgagatgatcatgtggtttgtctttctcagtttgtttatatggtggattacgttgatggattttcgtatgttgaaccaaccttgcatcccagggatgaaacctacttgatcatggtagatgatatttctgatatgttcttggatttgatttgctagtattttattgagtatttttgcatcgatattcatgagggatgttggtctgtagttctcttttcttagttgtgtctttgtatggcttgggtaccaaggtaattgaagccttgtaacaatagtttggcaatgacccttttgcttctattgtgtggaatacttggaggagaattggtattaactgttctttgaattcctggtagaattctgcactgaaaccatctggttctggactttttttggttggaagacttttgataactgcttctatttcattaggggttatatgtctatttaaattgcttatctgttcttgatttaattttggtaggtgatatctatccagaaaattgtccatttcctttagattttcaaattttgtggagtacaggttttcagggtacgacctgatgattctctggatttcctcagtgtccattgttacgtcccccttttcatttctgattttgttagtcagcatgctctctctctctctctgccttttggtaagtttggataaaggtttgtctatcttgttgattttcttgaagaaccaactgtttgttatgttgattctttgtattgttttctttgtttctgctttattgatttcagccctcaatttgattatttcctggtgtctactcttccagggtgagtttgcttctttttgttctagagctttcagttgtgctgttaattctctagtgtgactattctccagtttcttcatgtgtgcacttagtgctatgaactttcctcttagcactgctttgaaagtgtcccataaggttgggtatgttgtatcttcattgtcattgaattctaggaagcttttaatttctttttttatttcttccttgacccaggaatggtgcgattggcattgttcaatttccatgagtttgtaggctttctgcaatccttgttgttgaattctaactttaaagcatgatagtctgataaaatacagggggttattccaatttttttgtacctgttgaggtttgctatattgatgagtccgtggtcaattttagcgaaggttccatgtgtcgctgagaagaagttattatattcttttgcatttggatggaatgttctctagatgtctgttaaacccaattgggtcgtaacttttgttagttcttttctttgttaagtttctgtctggtggtcctttctagtggtgagagtggggtattgaagtctcccactataagtgtgtgaggttttatgtgtgatttgagttttagtaatgtttcttttacggatgtggatgcctttgtatttggggcatagatgttcagaattgagacttcagcttgatggatttttcctgtgatgaatatgaaatgaccttcttcatctcttttgattgattttagtttaaagtctaatttgttaaatattaaaattgctacacccacttgtttcttgggtccatttgattggaaaatcttttccaacccttaactctgaggtactgtcagtctttgaagttgaggtgtgtttcttgtttgcagcagaaggatggattctgtcttcatatccattctgtcagcctgtgtctttttataggcaagttaagaccattaatattgagggatattaataaccattgattgttcattcttttttggtttttcgagacagggtttctctgagtagctttggagcctaacctggcactggctctgtagactaggctggcctctaactcacagagatctgcctgcctctgcctcccaagtgctgggattcaaggcgtgtaccaccaacacccggcccaattgttcattcttgttttggatttgttggcggtggtggtattgtgtgtagatttccaccccttttctcttttggatgttggtaaagtgggattatctattgcctatgtttttgtgggtgtagttatcttccttgggttgtagttttccttccagaactttctgtaggactggattagtatatgtgtattgtttaaatctggttttgtcatggaatatcttgttttctccatctatagtgattgaaagctttgctgggtatagtagtctgggctggcatccgtggtctcttagtgtaggtagaatatctatccaggacctgctggctttcagagtttccatggagaagtcaggtttaattctaataggcttgcctttatatgttacttggcctttttcctttgctgctcttctttctttattctgtatgtttggtgttttgattattatgtggtgagggactttgctttgtggtccactctgtttggtgttctggaagcttcttgtactttcattggcatgtctttctttaggttgggaaaattttcttccatgattttgttgaatatgttttctgcacctttgaggtcggttcttaggtttggtcttttcacggtgtctcatatttcctggatattttgtgttagggatttgttgcacttaaaattttctttgataaatgaatctatttctcctagtgtatcttcaatgcctgagattctctcttccatctcttgtattctgttggctatatttgcatctgtagttcctggttgtttacccagtttttctatttccagcatttcctcagtttgtgttttctttattgtctctatttcagttttcaggtcttgcactgtttgaattgtttacttcatctgtttgattggttttttcttggccttttttaagagatttgttgatttcttgtattttttggtttgtgttttcttccatttctttaagggattttctcatattctcattggggacctctattattttcatgaagtttttttaaaggtcattttcttctgcttcatctgcgttgggatgttcaggtcttgctggtgtagagtccctagactctggtggtgtcatattggttattctgttgttgaatgtatttttatattgttttcttcccatcccttcttctagtaggtgcaggtagagtctcttcctgtcctggtggatacgggtccaaggttctcttctggtgggtgcaagcaggcccaatactcttcccgtggttggaggtggaagtagtacagggaccttggcagactctggataggctgtttggcctggacggggtccccgtgtacaggccccaaccctcaggaggctctgagcagggcaccagaaggtggtcagaaacaagcccacacctacctcctcctgcgggtggaggcaggactaggactctggcagactctggatgggatggtccgctgggatgggttcccctgtgtgctgtctccaggcctcaggaggctccagctgattcgcttaatcttatatgggtcctgtgccagcagccacagctgctgtgagttcataaatgcagcattcctgacatgttcagaaattgtttttgctcctgtccttcccttaactcttgactcttacaacccctcttccacagtggtctctgaatattggggtggggttgtgatatagctgtcctaattatggctgaacattccacggacacatactctctacattttgactagttaggagttcctgtgtttgccatcatctgctgtacatctctaatgaggtctgatagctgtactcatctgtgtgcagagagagatggatttagaagtcagtttgatattctgtccatttagcagaacaattgtaggctccttccaggggtctgtgaggtccccaaccatgggtcctaattaccagatgtgtggtagttagggtttttattactgtgaagagacaccatgatcatgatgtcttaaaaggcaacccttataaaggaaaacatttcattaaggctagcttacagttttttagtccattatcatgacaggacatggcagcatgcaggcatacatggtgctggagaaggagctgagaattttacatcttgatctgcaggaagcagaagcaactgtgtgtcacactgattgtagcttgaacaaaggagacctcaaagcccacccctccagtgacacacttcctctaacaaggctgcacctactccaacaaggccacatctcctaatagtggtcattttctttcaaactaccccaccaagcattcattttcttctgtggagcaggctttaataaaccatccagaaagtggttggttatccccataactgggtactgccatgggtactgccatgcacccatgagcatatcttgccttggtggttattattgtagctcacagggttttcagctaggtgagactcttgactttttacctagcagcctatatcacaccttccaacactataaaaggcagtggggaagaagctttctgctcagtaccaacttgatttcaccatgttccatgacctatatatgtggtgtctttagcaataaggtctttccattaagttctagtagacaagcaagagcaatgccaatagcctgtattactttgagggtctctgggatacctctgaccaactactcaagggaaggtaacacatacctggcactgggctttttatttggcaatgtatgtctttgaggagaagcaaaattccctgtgtagggtaactaattaaatgcttataaaatgggtttccatatggctttttaaaatatccttaagttagttgtagagagtgtatgtcacttgacaatctattcctgacttttcattctcttggtcaaaattttaacatattctatagcctgatttttcttggtgtgttgtttcttcaggacaatacataaacatttatgttgcaggacatgtggaataactagacactgaatcatgggtactttggtcctgggcttctgaccattgttagggctttctgccaacataaaaggaagaagccagattctaccaacatactactgtcactcccatgtagtaaaaattaaattcttcaaaattataaacatattttagagagagtagctttttgtacgttctgtttttgcttttgtggcatagtatcatgaaattttttttaaaaaaatgttaatatattcgtgtttgttccttacctgcatatagcaggtatttggaactcaagaggacaacttgtgggagcttattctttctttccatcctggaggtcaaattcaggtcatcaggcttggcaacaagtggctttgcctctgagccatcttgctagccctcagctgaattttgttaataatacttaacagtgtttggatggtcaaatacacgtacatactaaaacactaatagaggtatctgtatcttacttttttaataaaagtgagatgacaatgtgtactctcagcccaaactgtaaatagggttgttctgtaaaagaaaaaaaaaaaaaagctcctgatatttgtcaatatggttttcttagtgtgtatttgccttaaaagagcacagttgctgaaacccagaattattcttgtctgtgttttggtattttctgactgctgcattctgtgttctcctttttcctggtcttttgagaacattatttcacttggttcttccatgagattgattttgtagtttctacaaacgagtgaaaacttgtagcttttgtctttgtgtatctggtttgtttctcttacataactatttccagttttgttcacattgcaaataacaaaaattaattcctttaatggctaagtaatatgccattgagtgtacattaccacattttccttttccatttatctgtgatgggtgtcttgacttattttatatattggctagtaatacaattttttgtgtttgtgatgtgtgtacatgtttctgagatgtgtgttcgtatatatgcaggtgcccgtgtgtttagagaccttagctcagcatcagatgtcttcctttatcactctccatcttatttttttcagacagggtctctcactaaacctatacttcggtacttggcagaactgtgtagtcaatgagtttctgggatccacctgtctttactatttgcacacacacccccaacacacacacacacacacacacacacacacacacacacacacacacacacacacacacacacacacacacacacacacacacatacgggttcacagctgcacatcaccatgcctagcttttgcatgggtgctgggagctgaactcacaacctcatgcttatgcaacaggcactttaccagtcaagccatctctctatcccctgcagtttctttatagttctgttttttctgtctaataaagcacataactttttatttaagttgttgttattatttactatctacgaagtgctagataccaaaccagagtttcttacatgctagacagacattctacaaactgtacaccataaaactgaggatgcaggagagtatgtatttccttatggggattgaggcacagcatactgttaagggcacacttagtactgatgtggaaatgaaaacacttgtcttaatttctgaagataaatataactttaaatttcagtgttttatgctgctgtctttaagtaatagtagtataatttaaattttgtttaggcttcgggagcaagaaaaaaaagaagcagaagaagcttgccagaaggaagtagaagagtgggaaagaaaacttcttgctcaagcagcgccagcctgtatggagaacatgtgggaaattccagccattgggcatttcctttgtttagcccaacagattctaaacttaccagaaattgttttttatgagctggaacgctgtcttctgatgcctcagtgtaatgcctttctgtctaaaataatgacttctttactaagtcctccccaccgcaggccgaccttacatcgaagacctgctttgccttacaggacttgggaagcagtgctgagacagacagtacaacagtggtacactgctgtaggacagactgaaaatcctgatgactgtgctgaaaaacttggcttgtgtcctcagtttttcaaggttcttggagaagttaatccattggaagaaaaaccttttcacgagctacctttctaccaaaaggtgtggttacttaaagggctctgtgactttgtgtatgaaacacagaaagaagttcaggatgctgtgcttgggcagcccattcatgagtgtagggaagtcatccttggctatgactatctagagaacgcttatgtgcactttccacaattctgcggtgcagatgtacggatttataaacaaagaccctttcaggccccagaatttccagttccacccattaaagtcaaaagagttcctcgaattaaactggagaaattcaagtgtgactatgtaagtacaagtaatggagatcacagatgtaatagagaaagtctgccctcagccttcaagaaagagcaggaaattgattttggtccagcccgttgtcctgctaaaatgaactttgataatcatgacatctctgttgaaatggaagtaaaatccaactgtgacattaaactacacaggccctgtgaaattgaaaaaactgatagttgtaaagaaaatttggagaagcccagaagtccaggagaagttactggctttggagagccactaagtccaggtgaaataaggtttatagaaaatcaggaaaaatatggtgaagcttccacaataaagacagaacccagtccactaaaagaaaacgctctgaaatcttgccaaattcatataaatgggagtcacatcgatcatcaagacattaactgccacaaagttgtgagagatcttttgttagagcactcattgcagaaccacaaaaaactaaaactaactaagatgaggacgaaaaagaagaaaaagaaaaaaaagaaactgaaagatgttttaaatgaaaatttacaaagaaagcgtgaaggtcttcattctcttgccttcaagtcttacaaacctgagatccaaaataagttattgatcattaaaaagaaaggaaaacacaagaagcacaaatctggtaagctgacctaatgggcaagacttacatttaagtgtaattacatttttcttcaattatgcatcatggaagcactgattgatagaatgaaatgctatgtgtatttatgtgtatgtggcaggggtcaagttttatttcacatgaatcgaaacccagggcaggaaagatttttatatactaacaaaaaataactggtgtaatacatttgaatgaattgcaatttgacatatttggagatataatttgttttgtttttttgagacagggtttctctttgtagctttgtagaccaggctggcctcaaaccacagagatctgcctgcctctgcctcccaagtgctaggatcaaaggcatgcaccaccactacttggctattttgggatattatatttttatatttttccctgtaaatgatgtgcctccatcacttaaagtgatttttttttcttccaagctaaggacagcacatatatagcaacttatttctttatctagagtaatcatattatttattgagtctgaacttactcgccttagcactttctttccagtatggattttcatatctagaaaaaaaaacaacctgggaattatgtcaattaataaaacaccaagattgaagcatatacttataaaaggtggtggtggctcacacccttaattccacccaacactagggaggcagaggcaggcagccagcttgttttacaaagcaagttccaagaacatcagagctgatacacagagaaaccctgtctcaaaaagaaaggaaaaaaaaaacaaaaaacaaaaaaaaacaggaatttctaagtctgtcttaaatactctatatatttgccagtagcctatttgaacaacagaagttcttctattctggttgattgctcttttttttttttttttttcttttctaaaaggattctgttgcttttgtgtgtcctatgatctatcttaatcattttatatctcatctaccacaggataggtgagacaaaaacatatggtcagttatataacctgtataaaaaaaaattgcttgatggaagaaaaaaataagaattgcttaccaaaatgagttgtggttccagtcatcattgtgtgtttcattttcattccttctcacagcaacatagttaaattggtagaaatttgctactgagttgacaaatgaaggagtgagattttagttacttaaatcattacatagaactcagtatgttctaaaacgtgtgtgatgaatgaatcatgataaagtatagggccagagagatgattgagcaggtaaaagctcttgccaccaaacttgataacctgacttctaacaaacaggggtcaggggttaggtacacacaataaataaataaataaataaataaataaataaataaataaataaataaataaagtttttagagtagtagtataatgttaactaccaaaaccaggcctagatttgtttgactaaaacttttaaagtggtccatattgacctaactttttaaagtaactttcagaaaaacttaacaatgactatgtgaaggtcttcattctcttgttttcaagtcttacaagtctgagatgtaatggtattgcatccaatgttataagaataaacatttgttttacatcatttcagaccacttgttttgtaaatttttattaggttttgaggcagcatgatcttttttggttgagtttccatcatgtttgagtccagtgcttcctttttttatactttttagaaagtaagctccatgataatatgttgacaagggttcccttactgtgtcttagtataggttcatggtgcattctgggaaactcctaccacatttgttttgaaatttagaaatcttgggattttaaaggaagattatgatatatcttgtatttattgaataacatcccttagaaggacttgtgagtggttagagcagatgaaatttttttttgaaatcttacaacagttcagggctgaatttgttattttaaaacttttagttttcagagccattttagacttaaaattttaggtaaatgatttggggcctatgtattaagaattctggaagacttcaaaggaaagaaaactttgttttgattactctagtattctcttcaagtttatttttacacataactttcccatgtaatggttagctcgtgtgccttatagaactgttttgggttaagctatgttatccacgactggtttatcaacttagacttagagcaaactaaattttacatgtggttggttatctggttcacaatatgttgtagactacaggctttaaatttttaggtgtttctgatttttagttaaatttatggttgtgatgggagatgattttttttaaatagaaggtacaaatgcaaatcagtttgaatgatttaataattttagtacactgtgatccacttttgtaatttttaagcataatatatgcatcatttccactctacacttcctcagctacagctcttctcatgtctccccaatccctttcaacctcacaacctactctttaattgtcgttttatacacatacacacacacacgcacgcacgcacgcacgcacgcatgcacacgcatgtgtacacacacataaaaatacaacctgcaaattccattaatatctcccaaggccccaccactagatgaaagagttgcaagcaattaatggccgctaagagggaaaatcagtcttttctagacatgagctcaacctccacccctgctgttagattatccagtcataaatggtcatctgtaaacatgtatacatataagctacactacaactttttcagaggaaaaataccaaagtttaaaaaaattacaggttctctttacatttactgttgctattggtggaaaagcaaaagcagtgtattttccttctgctcttaagcaaaaaaaaaagtaataatattttttttaaaaatgtcctttcctcattacctcattcttttatcacttaaagaaacttcccattatttttctaagtaagtttttctcatttgtatgtatttagagtatcaggcacttctttataatacttaactaatagtggcatttatttttggtatagtttgacagagtgtttcccttctactctagcattcttgaggactgaaggattatttctggttttgtatccctagcacttagtgccatgtctaagaatctattaaataaatggatatatatatatatatatagtatggttttccagatatatctaagattagcctcttcctatatatcttttttttttttttttctggtttttcaagacagggtttctctgtgaaacagtcctggctttcctggaactcactctgtagatcatgctggcctcaaactcacagagattcacctgtcccttcctcccaagtgttggaattaaaggcatgcgccaccacctggctttactgtgcattttaatatcattttaagacatatgttttaataggatcatattatatatactttttaaaatatactttgcacaactctgatataaatcgatctttgccgaatcattttaaatggctgtataggattctatattttgtagtttattgaatcaccctccttagtggatgttttggttgctttagtatttgttacaggctgtgtgaagcaaatagctcaaactaattcaaaatataaagatgcatttgtagtaataaaagacatcttaagttatccattttaaactagttttagtataaaggtgttttcttctctcagcagtcattcttttcaactagatcattttgtgatacttataaattgatgtaaatagataaggcaagcagtttaattttcttataggttaagaaactttgatcagatgcaagatagcctggttgagtaaagaaaggctcttgctgccacacctgatgatctgtggtcattcttgggacccatatggtagaaagaaagaaccagctcttccaaattgcgtgtgcacgcacgtgtgtgtgtgtgtgtgtgtgtgtgtgtgtgtgtgtgtgtgtgtgtaattaattttttttttcatttgaagcagagtctcactgtatagctctggctagctggaactctttatagagcaggcaacccttgaagtttaagagatccacctacttctgcctaccaagtactgtagttaaaggcatttttggctaattaaaaaaagaaagagaaaattaagttcaaaactggtaaatatgggtctgtagaggtggctcagctattaagaatacttgatgcttttgcagaagacccgagttcagttcctagctctaaaaggaggctcagccatctgcatgcaactctacttccagggaatctgacactctactggcacctgtggcacacatacatacaggtagacaaacacttctaagactatataaatcttaaaagaaaaaaacctaataaatagccttctcaatttaataatcatgaccatacaataaaaagaggaagcaaacaggaaatctcagtgtatacgaggggaagatttcacaaagaacgaaggactttgaagaataattaggcttgaacagataaaacatgattaaatcatcaacagagcatacttatgattaatcaagttgttaaaaaatagcacaataaaaatctttgaagtaaaagttgaggggttagaatctatttcagtgtatgccatactatggtagtttaaataattgaatcaagatcccaagagcaaatgaatgagctttatatgagatatgtcagatacataaaaagcagtttatagaaaataatacaaataatataatacaaactacttggttattttcaaggccaaatttgtcaaaagtttgtagaattctatattgatggcacctagaacctaactatatgtgtcttcatggaaaatatttttagagtaccaactagagactgcaagattatgtgaggatgaaagaattcactgtacatcttgtcagtttatttttatttttattattttgcagtgctaggaatgaaatccaggtctgtatgcatgccaggcatatgttcaaccactaagttataccctcaaccctatgtcttttcttttttttcaggaccttctgtttttttccttaggagaattaataattaattcatgtaacactattgtatacatttgtacatattatttcatttaatcatagaaccctaaaaatagatgactactcttagcctcatttatttattaaattttttgaggacttattttatgtatgtaagtgttttgccttcatttgtatatgtacatcacttgggtgcctgtgctgggtgaggccagaagagctattagatccactggaactggaattaagagatgtttgtgagctaatacgtgggccctgggaactgcaccctacttctctacaacagtagcgagtgctcttaactgctgcatcatctccagccccaagattttatagatatttttttaaaatgaggaacacgatctatttacttgcccaatgttacacagctaataaatggtgggattcgaagaaaaatatcttaaaagataatttgggtgccattaagtagctgtgaaaagaagctggtagagtttgggtgaagagctggaaaatgactttgaagggaaaattaatcacaaataaggatgcaatgtaactttctattactttggcagaaaaaatactgtctaataagagaggtgtacagaaagtagacaaacatggcgcctaatttttaattttcagttctctcttttttcccccctccataactaatattcatgtaacactaagttaaagaggatgttggatgttcaggagttaccatattgtgtaattaggtaaaagaattgccatcatgataagaacattcctcatgagcagggagaacaataagaaaatcaattgtttaagatcaaattgttcatttacaacttctatagactaaatattagcttgacatacatatatagtaagtaaaacacaagttaaactccatttctgtggcttgacatctcaagcacttcccagatccactatttaatatcatacaatgtccttggattcttactttaacagtaacttacgccttttaccaattcacttgatataatattcctaaactgaaaaaactgaggagcgaatgtgttgggagaattttacaccatgaaaaggttagattcagaaaagatttgttgaaatcttttagtagcccagtgtggctaagggatgaaaacagacatgggaaaaacaggtgaaagacagaaatagggaaaaggaatgaaggaaaggagaattggatttccaattccagattatacaggataaaggagcatttgtgcctcagttaggagataatatattttttagttatgatttcctcttaggtggagtatgcgtttcataagctgttctgaacatggtgaaaaccttcattaggtatgctattgtaacattaattgcgaagttttattattaggactattcagatagtcttatacattttcaaagcacaatttaacttttcacatataacaatgttttaaactcagtggtgagagattaaaataccattttttatattctgcttgtattttaaactgactttttattcacacaatcctggatctagattatggttggttttatggggccaggtgatttgggggctctgggagtaaaaaccttgagtatgctcaggccatgagaacgtcctactggtggcagctagtatatgtcttgccctgaaacaaaaataaagtaccaaatcaatggaatatgaaggtgatctggctctggcatctttcactccattaatcagccagagttgatttggcttacctggcaagccagacaggtaccccctcctcacactgttacatgttccttgcaaagctgcctgctcagtgaatgaggacagctttttcctcaaagaaaaggagcactcttcagttgaagctatagatgtctgtacttcagtgctagcttctccaaataaccccaaataatagctgtttggtttttgtaccaacctatgcttcatataaaaaataatgtttaattttaaaatcctggattttagaaaacaaaatatccaggggaagcaaatatccaggctatcttttgaagttacacaaggtgttaagtaatagtgaatgtgcaaatcttttaatccgaacaaaagagattagtgtgatgtcaatcaaaagcatatttcatccctgcaaaaagtctaaaaggaagctgtgttatgtcatcaaacatcacagttttgaagtgagagaaatgtagctgataatatctgcttcagtacatagcagctaaaaagtctccattgtttatagtctgttcattaatataaatgagctaatatagtctctagcttgctaatttgctataaagataaattagagtagcaaattcataaagcctatcatgcttatcacttggttcatagtaagaatcaacaaatgggaactgagttttgtgaaatagaattacacagtgggaggaaattggactttggagttagaattcctgggtgtggtgcttacttactgccacttgagtaagttaactaacacttttgatctttagttattgctagtaaaatttttgtttcaacagttgttttgagaactaagtaagataatttatataaaattcattttagtaagtatatggcatatagtatttggcaatatcccaataagtatttgtcctctttttaccactatagacattagtcctcctatatccacaataaatagtataaattaaaccaggactgatcatgcccacctataatctcaggtgctacagaggatgaggccaaaggatctcaagttcaaggacaacctatgcaacttaccaagactctgtctcaagataagaaagaattggggatataactcagtggcagagtattgtccaagaaagcatggtgctcttggattcaattctcagtcctgaaaaaagtcttaattatttaaaagtaatttcagtgtggtcttcaacacaaaatggactcaaatgaatgcatagtagttaagatataacttacctctctttttccctaccactacactgtcaaaatttctgatgaaaagtgggattctagtatttaaggatcgcttcctggaagctatgcatgtgtgttgagattaatataatttctatcatcagtaactcacaacatagtaggggaaaaatatttagttatgatgccctgatgggtgttacattagtgacttaatgtaaaaataaataaataaataatagcagggaacaggaacacaagaacaaaagctatgaagaagaaacaagggggaaaaaaagattaaaaagtaagatttacagggcctagggaaatggctcatcacattaggttaaagatacttgctgccaagcttgataacctgagttcaatccccagaacccacattgtggatggagaaaacatgctcccagtagttgccctctgacctccacaagtgtgccatgatatgtggctactcactcacatggacatacatgcacactaaataagtaattatttttaaagtgattgggcagttggaggtagtatcagaaattcaagattgtctatgactctaagatccaggcttgcctgggattcaaaaaacagtgtctaaataaataaagcaagcttgttagagcaataaaagagaaaggattgagggagagtttccttttgttcaaattgtgttttaaaagtctcccacacaatgtaaggcaaacttaacaaatcttttcctatgaactatatataaatatatatgtgtgtatatatcacattatcatatatacatatatgataattatgagaacaattatatatacatacatacatacatacatacatacatatatgataattgtgagatggctcatcagttaaaacccttgttcttcagaggatctgagacctacatggtgattcacagtattctggaacttcattgccaggggattcagtcgcctcttctgagctccttgggtactaggcatgcatgcagtacacaaacatacatgcaggcaaactactcatacacataaaaataaatataccccaaaaactttaaaatgataaatagaaacagcatcgtggcattcagatttctaaggctccttgagctaactatatttttacagacactaagaatttaatcatttctgcttgagtattgcttgttttagcagctcactctggtttcctagatttagtactgtcatagtgttaagcacagaagcagataatggtgatgagaaaggaaatgtatgttgagtaattatattatcatttaattaaagcaagagccaaattacagcattggtaatttgtttaaaacaaatagtgaaatctatatgaatttaagcacctcaaaattcacatagttcagccattatatacacacattttgagtcaaatattaggaactatccaagttacaattttgtgatttcattgaaagggaatacagaaaataattgtattgtaattggaaattattttacttgagcttagtaaaatgttacaacaaaattatcatcttttgtgtgagatcttaccaatttagaaaaatttttaaaaagggatgttagaattatataattttatttattttctctgttgattttatttctctgttgattttctcagttgattttagcctagaaataattaggactcagaattaatagaggactgcagatgtagctctgaggtagagtacttccctaacatgcacaagactctgtgtttactctccagcactcaccaaaaaaattaacagaaatattttcatgctcttaaaaactcccataagacaaggtctctatttaataatttcttattgtcctcataagctagtgtcctatgtgtaacatttgttgaacaattaagtaagtatatttatttttcattgtttattttgtgtatgcatgtttttgcctgcatgtatgtctgtacacacaccatgtgcatgcacagccagtcagggccagaagaaaatctcaacaaactatagagttgtaagccaccatctggttgctgggaatggaaccctgatcctctggaagagcagccaatgcttttaaaaccctgagccattcctctagcccacaattaaatacgtttattatttgataattacacataaggggaagacatggtagtcacacacataataccagctcttggggacctaaggcaagagaatttttgtgaccttgagcccagccagccttggttacattgtgagatcttcaacattaaaacaaagtaaggaaaatttttagcatgttccttgccaaaagtgcatttatgtatgttttattttgtgacattaaatgcaaagaaatagatatatacttcagatgtgttcttgaaattggattctttaaggatgaggtttatttttcaccatgatttctgagtacacaaagtactaattgtacattaaagggatatgttaattacatttttaaaaatttgggtatcaaatactgccaaaagcagtccattaaacaaatggcaaagctaaaggaaggcatccttatgttactaaggtttccactttttgttgagggtccataatcttcagataacatacttagtcaggttcctgactgcagaagtcattgttaaggtaaggttcttttcagtctcttgtgagttgcaaatgtagatttttaactgagcagtagttttgtgtgtgacatttatgcctattccttttaataaatgccactattattgtgtcaccttgaacagtataatagttttggatcttatataaagaagcagcactgttaatgtgtctgtcacggttagttacagtttaatatttgctttccctgaggcttgtttgattcactattttcacttgacttactagcagccatctgttagttacagtttaactttcaaggctctgtgtaattgggtttctgttaatgaggtgctgtaaacagcattatgaagtttttctcttttaatcttgaaaggaaaaaaatccgtatctaaaaaagcaatcacaaagaagaggaaaactgtcgcaaagtcacctgctgtgccggagtttcaggtaaatgtttcaacattgtcaccaaattcttccgtttaatttttgtttcagtgtcattccttgagagaatggctgaatactttaatgactgttttcgacaatgtactttcctttaaagtaggcaaaaaatgtaattttttttaatctttggtaaaatttgataaatttttagtttctaatctatactaagttttgcagatgtagtttaatggaaatgtatgtatacatatttctcttcttaaatataaatatgtaaatgaaaatcttctaaataaaaaagtcatggcttatacacagtaatgttttctggtaagcctcatgttactctggtgtattactctggtaagtcattcttacatatttaaccaatataaaagtggtggactgattaacttgaaaaacaggtattttaactctccgctataaataaacttagaagagaatattcagtaaaggctaaatataagtctttaaacatttttgcaaagaaatttgttgccatatgtgaagggctaatattgaaagtaagcaacctcattataaggaagtatgcttttattttctacttacccagttaagtgttttcttcaacaatgacactttcctaaaaaaattttctttgtaatattgtggccagtccatttccagaaagttttataagctcataaaataaaagtgatacttttgaatttgtaggtctcaagtagttatgaaaataaaggagcaagtaaaatacaatgtagcagtgtcataaatctgttttcagtaaaaatcctatttgggggaagttgaaaattaataaaaaaacaggtatctttaaatagtcaaaggaaatatatatatatatatatatatatatatgtatgtatgtatatgtgtgtatatatatacacacatatacatataatagttgacaactttaatgacattatgataaattatattctttagaattttttgcataacctttttacaaaatatccaataaaaatgtaacttactgtttggttggatgccatcctgccatttattgcttgtaacatgtaatggtataataatatatttttatgcttccactggtaaccatgctagcttttgttatttctcccactcatttttccctcaatttcttactacagaaaataaccatttttagtattttcctttcttctatattaatgaatagacttttgtatttaatagtaacacagactgcataaatagtgctttgtacagttgcagatagtattagtaatatatgaaatccatactttcttttttaagttatcaatattaaaaaaatttattagtacatcatatattcagtatgtcacaatatcatgaatatgtataattgaatatattgttttatgaaactggtgttatctctgtgtatatgtgttgatatgcttgcatgtcaacatgtaaaatgtatttttgactctggctcatggaaaaaagttggaaaacattgtaagtgatacttctagtcagttattgaccatttgcttatcactcagaaatttaaggtcaaaagtacatgttttgttagattgagctgttcaaaataaataaaatccttttcctggttcttaaggcatgggggtagtggaactccccccccccgccccgtgtgtgtgtggggtatagctgtcttgcttgtgagtctatattgggctaaggtagctcttgtttctagtttgcaatgtgaatactatgttgtgattcatgaacagaacttgaaacagtcttctaaaatagagattaaaggggctggagaggtagctcagctatgaggactttcgctgtactttcaaagaaaccagatttggttcctagcatctacatagtggctcacaaccatctgtaactccacttcctagggacccaacaccctcttctagcctccaaggacagtaggaacatgtgtgatatacatacatgtaggcaatcgctcatacacataaaataagaataggtgaaccttaaaataccaattattatctaataaatgaatttttttcttccccaaagtactggtagtatatttagcatctcatttattagtattgaacataaaaaatactttgtagaaatagtaagattttaatagtagccattttaaactaaaatacccattcttattactgaaaataaaactttgatgcataaatattaaattgcttttataaaacctgacctacttaccaaaaagctgatctttgatagaaaatatgcttagagagaaacagtttaaaggattaaattttttaagtcttaatgacctaagaaaaggtgaagcctgtttgacctcaatttctttgacagtgtttttgtttgttgacttgttaaacactggaagttaaatttgcctcctttagctgcttcatgagaatacatgtttatatgtacactataaaattctgtatcagaaaatatcttcccattcatatttagagtatgcactagggactctgaagtgatggctttggtttcattttgtgtgtatattgtaaggaaactaagaggcagggaagcctctcagagtgtcagctgtcttctctttcacccaggaggccctgtgtcttggaagcacattctaaattaatactaacaagaaagggatttaatgagatgcttttctttgttcttactaaatgtatctgtcctcttactaaagtgaattttgactgtgttgattctagtttccatagaatcaccatctgaaattgaagactttccttttttaaaaagtaggaattgaattgtatgtgacatatagttggcataaattaaactatgtttttactccaaaattttgtagtagcttagcatgatttaatatattgtatatattatgtatatagagatataaagaatatatttgcatattaagagtataagctaagctgggcctagttgtgatagcacatatctgtgaccccagcacttggaagactgagactaagctaggctacataagtttgagggcatcttgctctatgtagcgagattctatctccacaacagcagcaaaggttgtaaattattatgtagatgttaagttattttaatataccttcaagataaatatcattaaaaaatcttctgagcctcaaacttagaaaaattacactcggaacttagataaggtaatttattttaagatcattatcctaaaaatccctgccccctaaattcagaaattagttattttgaatttttatgttcattaactacatagcagaatattttagtgtctgagtagctgtgctggtttgcagttcacagccattaagtacatgtgatccactgactatacctataaacttgtcaagtgtgagacatactaaatccaaaactagcaaggctctcctgcaattcttacgcacacagaatttgagaagagttaatttaacacagcttactaactaggtaagcccttagaagagttacttcatatagcttttaatgctttggcctcagctatattccagcaaatgaaatataattatttgccaatgtcatgactgataattaaagagctttaaagattttaggatgtgtttagtttgttggatatatcccttcattgttcctctaaatttctacatgctacatataaagcttcctcttgccatcttaagtgatatacctaaaatataaggaaaattgctctgagccttgccatataaataagtgaaaaatctatgctgtgatattagccaatacaccaagttcagtgaaaaaaaagacaaatctgacacagcagtagtaactacacactgcagtgagtgctcactaaaacctactggaaagaggctgtcgccctatagattcatagatgcaatagaagctgaagatgtttcctagttgtagaactacttgccgagttggctagtctactgcttgacaaccgtttctttcataaccaaatttagcaaattgaatgtgtgatttccaataactagcatttacactctcccattacaatactgtgtagtgttttttactctgaaattacttttattttttgtatttaatacaaaaataccattgagcacatccccagtcctgaaattgttaaatttgaattacttaagtatatacttcccctgctttattcagtgcatttgaagttttatagatatttctagaaggtaattgttaatactaattatggtatatatctgtgataatttttcttaatcacttaggttgaaccatattgccattttttttagataaatgtatttaggaatttctgatagttttagccaaatttaaagcatttcctatcttctgttttagtcactcaataacaactagcatgtatcttgttgtgtgacccacttttgtttgttacttttgtccaattttctaataaaagaaagtgtatgcgttttaagaaaccagtaactttacattaatgagtgtaattagcacagtggttgagagcactgactgttctttcaaaggtcttaagttcaattcccagcaaccacatggtggctcacaaccacctggaatgagatccggtgccctctactggcacacaggcagaagactgtatagactgtatatgtaataaataaataaaatcttttttaaaaaaagataaaggttggtgataagttataaatatatggcatattttaagttatatggtataaacatcaagattttcttgagtctgaaattttttgtctatgtagatgcaattttgtttccgaattttctgttactttagatgttcttaaattgcttaaattattttaggaaaagggttaaatatattaaactcattggaaaatttcaatataattttacaggaaccaaatggagtaacaaatatttttcttagtatttctgatgcttcagtgtataaaactgtagttaagcctagctaggtcagttaataactaagaattcattgtttgggttatttgccagagttaaccaagtaaaataaaacgagccacacaattacagaaggaaatagataccctttgtaaagatggttttattaaaaatctattaagctcatttgggcagggtggcacatgtctgactagcacctggtggctgagcaggaatgtcatacatttgaggccagtcagggatacatggtaaaaccctttctcaaaaaaacaaaaacaaaaaacagcaacagcaaaagctattaaactcatgaaaagatggtgtacttagttttgttcatatctttatattacacgtggttctggatctttagtcccactgccagcagcaataactcaagtttgttgaaatatatagttagcaaaccaaagcaaagggataatggccactctcaggggactacaattcacctgctcaaactgcctggtgcaaggatttcttacagatgattaaataaccttaaaatctaatgagtttccagatctttgtcattctggggtcaaagttaataatactaaaaaagtaatgggattataatgccaactttgaggtgtagaatgagactaccaatgttgtaattttagtttattttatatgaagcttggagttcatacatcataacaagtaaataactcagtaactggagctttccttgcttttattactgcagagaagtagtcttaatttcagtgtatgttaaacaatttctgttaccacatttttggtgttttatattatgtgttatcaagctgtgtttttgtgttttgttttagcttatttgcactaatcttgatgaactcagggaattaatcacaaaaatcgagaatgaactcaaagatctggaaaacagtagaaaaaaatcggtaggtgtttatcaaaaagttctatctattattgtcagcattaaaatttatacctgcttttttccaaagtttttaaaaatcttgttctcctaattacatgaaaatttacagctaaagatagaagcattgtttctttcatttctcccatgtgtctaatttcacttttgatacaaaaagatggtatcggggcaagaagattaattttctctgcctggtttataacaagtatagtgttatacattactcagtatgctgattgtcttctaactggtagttttttggcatattcttcattacatatctttagtggaagtctattgcatagtaacagacttttaattatgtgtagtataaaacatataccagacccgaattctctttagtcttaccaagactcctaaaagaactgttatcagactatagatttttaaggttaagttttactatatatcctaacaataattgatcaactaattttctggatttttcattattaagaagacaatgcaacatgagagtgttacatatatgctctcacttggtaaagtcctacatgttgttctttattaaatagataatctcctacttaactggcatttataattggattatggcataatggaaacataattatatgccaatagatcaatggggaaggtatcaaatatttaagaaaattaatcattaaaaaaaaaactttggttttatcatgaaaccatttgctttgtacttaaaactgttaatataaatgtgtataaataatgatgactgattcagcaggtagccattttacatgctgttaggaatgatatgttggaagtatcagaaaacttcagacctctgaagttgtttaatgcaagagtgaaagtatttcagaactctgtcacatgatacctctgagaagatcactgtgacctaaaaggtgaaataatgttccgaatagtactcagccacatgtggtggctcacacctttagtaccagcactcagggaggcagtgcctacaggatctgtatgagttcagagccagcctggtctgtgtaatgagttccaactctactatagagccagccaacactactgagaccctgtctcaaaacaaaacaaaaacaatcttttttttttttctttttggtttttcgagacagggtttctctgtgtagctttggagcctatcctggcactcgctctcgagaccaggctggcctcgaactcacagagatccgcctgcctctgcctcccaagtgctgggattaaacgcgtgtgccaccaacacccggcttaaacaaaacaaaaacaatcttaatagtcctcagttaacgaaaaagaccttatggtgaatataccatcagagggtggggaaacatatttcagaaatacttccatttaaaaatagttgagacctttgtattttcatatgtactttaggtatctgggaagtctctttatgtggaagaatgttttattaaaatttactgcactagtatgttttgcaaaaaaaaaaaatcatgtgaaaatattttcagccaaaagttctgttttatcttatttaatattttatgttcataaaaggctgattctttagtaggaaaggatattttctttaaaatcaggggcataacttagttttacagaagctattgcttctggttattgtctcagaagctattgttttcatctttcacaactgaacagaagtcttcacttacttcacttaaacttaactttatcctgtttttataaaaaagttttgttcctattgcatagttttaagcatagttgatttaagtactcacagcacatattacaggaggaaaacttttacaagcattcgggattttctgcaaagccatcctccacactttcttagtgaatcgaacttcggtaagcatataggatcaagtagaagaaaaagtgaaggaaacaaactgaaggtacttgacagtatagtctttgagaatatgttcattagaagcttcagattttatatagagtttgatggattaccttttgtgtctccaaatgacgtcctttggtatttgcaagttcttggaactctactaggaataattttactgaagtactaacatagggtataaactattttcccttgactgaaactgcctaaacaattattacatagacaattgtctcagccaacaaaaatgatcaccacagagcataaaagaaataggaaagttttcattttagaattctctctctccccaacacaccttttttctttacaaaatctgatgatgaatgtgatctctgtaaattgcagaaagtaacaaattgggtatttgttactatttaattccagcttgtatttgtttgatatcatttaagagtaatatgctctccttaacataatttttacataaactagaactcttaaacattagtaagcataaataatatcaaaatccaggcagtggtggtgcatgtctttaatcccaacacttgggaggcagaggcaggtggatctctgtgagttcaagaccagcccagtctacaagagctagttccaggacaggctccaaagctacacagagaaaccctgtctcgaaaaacaaaaaaacaaaaaaaggaaaaaaaaaaaaaaacaaaaacaaattcaaaatccttaccttaaccatttaatgaagaacttttttttgcagcataccatgtttgtgcaatttaagcctttgtaattgactacaggatccctgttgtgaatatcagttgtcttattgtaaaaatctgttgctatcacttgttcttattagagatttatccatatattttgaatgattattttgctttggtatgtttgcttcaggtctttttttttcccacattgccagcttgtttgccagttatcacttcttaattgtgttcatttatctgctagttggatactgtgattaagaaaccatacttactagcgttgagcttacagtgaagactattacaagaaggctttttcatacaaataaaatgtatgaatttcacaatagagatcgatgtcttattccttatcttctgataaatgatggattaatatttatcccaaggattaatgtcaaaactaaaatagtatttagaatcaaaacatgttttcatttaataataatttgcattatttcagtaacaatgcataacaaaaaagatgtaaattttcattccccgtgtcactactaaagttagagatttcacatgggatgttgatttagtaacgattcatacaatgcttagctgttttggagagtgtcttctctctggggtctgtccagattctgtttcgtacccaacaacaagcagaaccaggcatcctgtgcattcctgttatcatcttcttatccagggaacattgcattaaaaaggttgtttttgttttctaatgtaacagacttcatactgtagagcactttatagttagaaggctttttaaaaatacctcaggttttgccattgaactgtttgttacaaaggaaggaagattgtagtttcttaaaatctatctagtggttccctttgggctctataatgctacacttcatcactgcctcagctatgtctaaagtgagactctggttaagatgtagtttgacaaaaccttttaatttttcttttcataatttaggtcacagaaaattttagtgttctcaaggaggaatcccatttttactgcttgtgtttgtgtggctttagttgagatatttccatttctgcttaactatttggaaaacattctttctactcttaagatttttttttttttttagttttcctgaatgttagagtatgaatgttttaataaatttactcagtcttactatatttgaaatttgttaggcatactgtattctaggtagtttgtttactcaagttgtgctttattacagtttattcaaagaggcatctgccttcaagcaaagatttgcataaatattgaacataagaaaaaataaaaaatgttgatggtctgtttttttccttagtgaagagtgagctgcctcactaggaatgtgatctctgtataaagcagcgatgttatcacagtggtaattgtgtgcctttgtacttgactttaatgctaatttagaaagataatgaaatgtgatatatactgttcaatgtgagaattaatcataaataaaaattggtgaaagtatcaagagaaaattttactctggcattgttaaaacactacaaaaatgtcaagcagtttattaaaatagtttgtgttgggatttctgtttgtttgtttttaagacaaaatttctctgggtagccctggttgtcttggaactcagagatatacctcctcctgcctccccagtgctgggattaaaggagtgcaccactacacctggctaaaatggttacattttatttgtgctattttcatttcataggagtttacattctttacaagccacctttggattggatttggttttaaattagccaccattgatcatcagggatcactgacactttaacagtttattttaatttttcttgaaaattacaatccaaccatattaataaattgacagtcctttccaacataggatttctgtttgtaggaagaatcaggccaataatataagtactttgctttgtaatggatgtttctttctatgtactagtgtttgtaagcagaagtatttttaaaagtaggatttaaaaagtaattcttatgcattttatatatgactttacttccttattatatggttcctagtcaccttttgtgattacatacgttacaagataatctacatatgaaattggatggtttgtaaaagtgagtttgccatccaaagcatctgaatttgttaatatgtaaacatatccatacaatgagatactttgtttcctttttttctcttaggattccaatgtccccagcattagtagattgccaactccctctttacagcaccctagccagtgtgaagctggcattgtcaaacccatcccagattactgcagcaggatggagttgtactttagctatgaggtaagttcccccatgctcatttgacactcactgagatgcagtttttcattttacaatattgtatagttttgtaagttcatttctttcctcatatgattccttaggttattggtgcattatactcaaacacttagaaaactgcataatataataaaggatttaccttatggccatagatagcttcttttaataatattccctatagggtcatttaaaaattccatggtttggtagttgaacatataatacaaagggagctggcaatctgcagatgctgtggacattggatgagaagcaataaaaggtaagctgcaaatttagactgttggctattgtttttctgttgcatgcttgaaattcattgttcatgttgaagttataatctgttgtaatttaaaaatacatattactctttgggctggaaagatggctcagtggttaagagcagttgctcttgcagagaatcaggttcaattcccagcatccacatggtgcttgacagccactgtaactagttccatgggatctgatgccctcttctgaccttcttgggtatgaaatacatacatggtgcacatatatacaagcaaacaaaacacacatcaaataaaatgaataaattctttttagaactcctctattttcagtaaagtgccctttaatgataatattaaatgtatataatgcatttaaattttattttaaaattttttaattcctaaaaatgatcagaattgtgatgataaaaaaggttaaaatttccttgtgttcacttaacttgttttaaagtaatcagagtatatgcataatttatattaaatattaaactaaatagttttattaatgatttagcacactgtagcatataagtggttgccccaaataccaatcctgtctgttgatccatctatctgccagtttgatttttagttctgtaatcagtacacatgaagattttgcctttcttaaaaatcagtgaattttacattagtaaaggtaagggaatgcactggttttactcttattttccttgtaaatacactctgtagcccaggctcacctcaaacttgcagcagtcctcttgcctctgactccagagtgctaggaatacagccttgcgccaccatgccagttgttgttttcctttgttttaatttagttttaaaatatgtcactattttaattactattatactttaaattaacacagtctttggagattgtaacttttaacattacaagggtatctgcacaatgtaatctatttatatttgtttaggaattggctttgtggggaccaggagagacagcatagtgtttgagaaggagagtagattttaacatttatgagatccagaattttagcctgaagtcagttccattttacaagtatttcctgagagtgattttaagccagctttcttctagaaaattatgcccttttaagttttaataaattcatcttggaagaaataacaaaaattgttttttctcatatctgtgttttaatcaatgaagttgattagttagaaaagctgtttctggcttgtgattacttacttattttaaacatcaataaatatttgttgatttgaagtaaatttttatattgaaccaaaggtaaagcagattgttattaactctaattgcttattaaaaatggataacttttatgctttttgtaatagttcctctgtacattgtgaaaatgaggtcactagtcagtagaaagcaacagtgttaggactaaagagttagtttgggggtagagtgcaaggctcaggattcagtccttagcactggtggtgtgggccacaagatgtccttattgcatattgattgtaagcatcatgtttcatccagctggcacaggaagctaagttccctccctgttaagtagttgagtgaaaagccttgctttaaacaccaatacaagcagtgattctgccctcttaatcacttcaagactatagattcgaattcccatggcggtgtataaggttcctttcgctggagtcattatattttttatacttttatacattttattaatcttctatgatagaaaaccatagatatttcaaaacatgttaatgggtaagacaggtatatgaaacttataaatctgttctctgattaaacatttgagttcccttgtgtatagtcataacaagtcaaagtgagatcctgtctaaaaccaagagaagtgtggttgccctacatgaatactatttcttaatccatttcctagttttgtttcatggcttagaataagcacttcatactgtctcaccaattcttttgagaaaagttttaaattttgagatacaactcactgcttactttggtctgacttgtgcttttcttagaatacatttggaaagaaataagactctttaatatgttagagcagtgtctctcagtctgtaggttataaaaccttggggttcaaacaaccctttcatgggggtcacctaagaccatctgcatatcaaacatttacactaggagttatgaaatagcaatgaaaataattttatggctggggagtcaccacaacatgaggaactaactgtattaaagggtcacggcattggtacgtttgagaaccattgtttggtaggaaataaaatttttcttaagttgggtggtggtggagctcaggaggcagagacaggtggatctttgagttcaaggccaaccaggacagccagggctatacaaagaaaccctgccttgggagagaggtagagtttttctgaaaattttccttaataccatgatctgacatcttattaagatgcaaattaaggatggagaaatggccacagttgttaatatgtgctgctcttgcagaagactggattcagttaccagcacctacatggaagtgcataattccagaacattcagctccttcttcaggctttgtgtgcattacatatgtgtggtgcacttacattcatgtaggcaaaaatactcatacacataaaattaaccttttttaagacatgaattagcatagggttaatatttggtgtgtccacagcatataatcctacatttcttactcttctaataaacagttcccctttaagattaaaaaatctcagaagaaatatagctctttgtgtttatgtaaatacacattctgtggcttccaagtactcttttggtaaagtatgctattaagactttggtgctgggtggtggtggcacacacctttaatcccagcactcgggaggcagcggcagactgatgtctttgagttcaaggccagcttggtctacaaaactacacagagaaaatctaaaaaagaaccaacagaaacaaaaaaagactttgggttatagaattgtcatttaaaatagcaaaagttttatgtgtatgtatgtaaaaaattggcaactctgtgtatagctctaggatatacttttgctataaatagtagccttactagtctacatatgggcagactgactcaacagctgcttataggatgaagtctgattttatgtgtgttaaatgtgaacaataataaatgtgtgtcttttgttagaaataatacatatggactatatgatacaagatatttcctccttttgtaaattcctgttttagttgcttctttgtgctagaaactgttaaaataattataacacctcatttatggatggatggatggacggacggacagacggacggacggatggatggatggtagacagacagaaagtacctgtaatactagcaaatgggagggacaccagtaataattatagtgtagtataggttttaaaaagccatagtatgtaggttttaaaaagccgtagattgggcttgggaaggtaactcattggtacaaatgcttgctatagaagcaggagagcttgtgtcctaatatcctctggtttctacatcctcatgcctatacagtcacacttatatcaccacacagaaaataaaacagttaactgttttaatttttttctatgctagaaactgctaaaattattgtaacaattcttaaggaagtttgttaagagtctttttttttttttttacccccctctcttagaagttgcaaaaaactttacttcatgagctatgtctacttatttggtgaatttatttaaatatctgtacctttacatgattttgtttgtttgtttgtgggtgtgtctgtccgtctcctatcgtgccccccccactggacatcaaacccaagactacatacatttggtaaatgatttattaagatatttacaattgacaattagactatttttaatatgtatttcctacttagatggtaaacattgggatttctcctgtagaactgagatcactaaacatactcagatttcttacaagatatttccttcttttgtaaactcctgtgaaagaaatacttttgatgatactggcattttgttacttttttattagaggctaaaacttggttgatactgattttaggttaagtcttagaaatttattttttgaaacttatgtttctagggcaaatggtaccatcggaggcaagctgtaaaagaattgcatagtacactggtacgccttttaaatgaattgctgccatgggaaccaaagttaatgaaggcttttcagagaaacaggtaacaagctttatgatgtatttatttaacttattctaagacccctattttatgatttggggtttttccattcatttgtaattcagcaaatacaaaaccatattctctgtgatttgctttctaatggaagaagcatatggattcaaatatgataactgctagtgggcaggatcctgatggaggggatgtgacattcctgtttgagactgtggaggctactcctaaaaaaaatgaagtgcatactggcgggaaaatgaaatagaagggcacactctaagtgtatttggcatttggaggaagcactaagagtcagttaaaatcaaagaaaaatgattgatgaagactgaggtaggacataaagatcagaggtccaggtagccatatcaggtaggacttaatcttttaagaatttacatggaccaggataaaaagcttttgaaaggttttacagagacaggatgttatctaccgtgtttctgttgtttgcttgcttgtgtgcttacaatgctgaggcttgaatccagagttttatgcatggctaagtaaataccactgagctatttctctaaccttaatgttttgttttgtcttgttaattttttctggttataattgatttatacttatgtttaccgtgaagcacatgtggaggtcaggaacaatctgcaggaaactggttctttcctttttctgtgtgggtcttggtagcaggcactattatccatttgaaccatcactgaggccatctggcctgaagttttaaagtgcttgctctagctgccatgttgaaatcgctgtaaagatgaaagaagataaattacactgtggtagttacactgaaaaaagtgggagtagattgtagtattgcacatgacatgaagtggttggattttagatatagcttcacaataggcttcgtaaaatttatggagtatgtggtgggttaatcctatctccagcttgataagatttaaaaacagtatggggcgtgtctctatggcatttcttagattagtttatggagggaggaaggcctggggccctggactgaacaaaaaagagaaggtagctgagctgcagcatttgtctgtttcctgactgcatgcattgaaaacagtcacttaacccataatgtaccctcagactaaaataaatatacccctaccatccgtcagttgcttctgtcgaggtattttataccagcagttaatgaagtagctaatatgtgatagaaattaatgagtaaaaattaatttttggtctaaacagttatcatcatagatttccattaatggagacaggagtgactgaaagagaatcaggtttgaggaataccagggattgaatagtttggatttaaacatgttaagtttgatatactttctagacacctaattggtggtgttgagtaggcattgtgtgagttatataagtaattcagtagctttctagacttgatgtacaaatttaggagttatcaacattgatgatatttaaagccgtaagattagtagaaattgtgtggacagtggacattccaacattcagaagtgaggtagcagtacttgggaggtggaggcaggcagatctctgtgagtgtgccagcctggtctacagcgtgagagccaggtcaccttttttttttttttttttttttttttttttttaagtcaagcatgtgtgtgacatgcagattcctgagacttactggccagtgtacttagtgagccccaggccatcaactcaggactcatttttcaattcaaatagagaattttagttatttgttttccttaataattataactaactacaaccctcagaaagacaaatggatggtgtattcaattttaattcacattttttttttctgagacaggtttcacggtatagctttggctgtcctggaacttgatttgcagaccaggctggcctcgaactcacagaatcctcccgtctctgcctcccgagtgttgggattaaaggcgtgtactaccaccacccagcttattcacaaattttaagatataacctttaatttcttaagcatatatcgtaagttttgtcttcttgggcaattaataattggcaagactaaattagtaggcattttaaatacacttaaaacataatttaatgacaattgaaaatatttcaacatttaacttagtatgctaactaacttagcttccaaaaagttccacattacattggttatttcagaagccgcctgaagaaagactatgatgatttccgaagacaacctgatcatggtcagttcactagagagctatggactactgaagaatgtgaagggaaccctgagagagagcctcctacagcagaaatcagtaagtctgtagatgccgcagaacctctagacaacctggagaaagaacacgtggattctggtaggcattcaaacttttcaaatataagcacaaagagaactttctgtttgttgtgaaggcaaaaggtaattgggtcagtgaatgttgattaaggaaactgataatttacagaaatactgtccatattcttgtatacaatttcttggcagtcattattaaatttctaagaggttttgaagccagtgcttaaccctaaattatatatgtattgcagaccatacactgcttatcagttacgcatttggaattcactgattatctttttattgttactacttttaaagctctgttggtaaagtttgctgcaaatgaatatgagaaacccttaagattgtgaaaggtttttaaagtgaggtgtgactgaggttgatggctgactgagagcaaaataaacacatcattctaataagtatgggtagctagaccaagttacatgcgattcatttctgctcatcagtggcattcgttagttatataagaagttaatctgaacacttgtggttagtaatatgttaacagatttcatatctcttgtgaattgtaagagtgaacttcctttgaccagatatgacgacaattgtttaaggataaaaaaaaaacaggaaaggctgaacattggttttcattttcagtctctaaagatcaaaatatagaatagtaaccattcctctatggcgtaaaggtttccctatctagagaaagaaaactagccagattaagctgtgtatctttttagaaactgagtttttcctcagcacttatgccttggcagcagtcttagtccaggattgatttcagtaataggttgatcttaagcatagctgggatgtgggaagtgagcatgtcagaggtcactgctaccttcatcggtagtgctgaagctttgggatgactgtgcagtagattttttaaattgcctgttcagaaattgactttaatttttataattggtgttactcaaaaactgttttctataaacaaaatgcttgtttttataattttcagatgatatgaaattgtcagaaataggctatcctttggccagaagcaagttgttgaaaaaagaattgtcttctaaagatgtagtgaagacactgcctaaaacacttaaacgacagtctaaacaaagcagttatctggatgatagcacaaaggagctttccccaaggaagaaagcaaagctaagcacaaatgagacatcagttgagaacttggaagttgatatgcagattgactgtttgaatgagtcaaaacatacagaactgccatttttggagtcatttgcctcaaaggattcagtaccagtgtctactctccagaaagggaccaaacctattcaggccttgcttgcaaagaatattgggaacaaagtgaccttaacaaatcaactgcccccttccacaggtagaagtgttcctgctgtggaaaagccagctctgtctccttcagaaacaagccccataaagccagcattgagctgccttgccggtacaaaaggacctttacagatggtatacaaaatgccctgtggtcagtggctgccagtagaccttcacaatagttctgtcaagattcagatgcagcctgtggtggattctaaaacaggagaaaagatcatgcagcaagtcctaattctgcctaagaattttgtgattcagcacaaagagggaaaagcagttgcaaaagagctagcagcacctcagcagaagggtgcagagcaatgttccttagtgtctgttcctgtcacctcaggagggacagtttctacccaactgcctaatacagtttttagtaagacaattacaccttcatcaaatatgagtgctagatcacagcctttgtcacctgtaacctctgtaaataatgtattagcatcacccgttaagactagccaaagtgaagcagggaaagtcaagaatgcagtttcgtcagccacattcccccagcctattacttcacccaccatttcctcaacagttcagcctctgttaccagcaacaacactaaatgaatctacagatcctggcacttccctcacctgtttttcacagcaaactgttgattcttctgaggcaaagcaagaactaaaaactgtatgtataagagattcacagtcgattcttgttaggactcgaggtgggaacactggagttgtaaaggtacaaactaatccagaacaaaattcacccaacagtttatcttcaagttctgctttcacctttgcacctcaacttcaggcatttctggtgccgaaatcaacatcatcccctgctttttcacaaggagctggaatgactactacatctactcccccatctttcagccaaacacctacttgtgtttctatttcatgtggctttcatccatccgtggggaaaaatctcaaacctatgttaggccaaccctccagcagtggctatgtgggcccaataatagaaaaagcctcatgcatgccctcttcacccatgaaaccctccatttcttccagctcaatgctaccatcaacaacaaatagttcagttagtgtaattagcttatcaacaggaaatttcggacaaaccaatacaaatgttattcagacatcaagcaaagcgcaacaagtagattatttcacaaaaagttaccaagttacaagatcagaagcaacgacagcaataaatggagatgtactcagtgagactcctgttcagaaactcatgctagtgccaagtccatctgttcttcctagcagtgctccttcagttaatatggcgccagtaccaacatctacaagtgtttctacccagaaagttgtttttattaacgctcctgttcctagtggcactgcagcctcagctattgttgcagaatcattaaaacagacacttcctcctcccttgaataaaacttatgttaagactccagagcaaccccaaatagtactaattccgtctacattgggagcaccaataaaaatcaattcttcaccaactgtgtctcagattaaagatgtgaaaatcgggctaaacataggtcaagcaattataaaccctccaggaaatctgccagctatatcatcagttaatatattgcaaagtgtaatgccaaaagaagacaaaagtagtaagggctatgtttcgcccatgtcaacaagtggtaactcagtcctagcaagctcaagtattgtgagtcaaaatcttccttctgttaatgagtcagtggtttctacaacaagagctgcaaacatgttttcaggaacaggaacaaatgtacctttgagttccctttcagtgacctcatcctcagcttcatctgtgactcgacctcctgttttagtcagtggaactgactcctcttcaagaattatgcctgttttgtcaaatagactttgcacatcaaatcttggaaacactgtagctatatcaactgtgaaaacaggacaccttgcatcatctgttctcatttcaactacacaaccaacagtgtctcctaaacctttgacatcagcattgcaaatccctgttactgttgccctgcctacacctgtgactacatctccaaaaataatcaacacagctacacattcagcaacagtaccaggagccacacaccctgtatctctttccaaaagacagtctcggacttctctccagtttcagtcgccagggacttcaactacagtgccaacaaatgcaaacacaaataaacctcaaactgaattatcatctctctcaccaagtccaggtaaaataattaatacttccaacgttacttctataccaaaccagcttatgtccccttcattagtaaaaacaacttctggtaacaattctactgcaggtggctctgccattcacactggtacaccaccattaaatataactagtgtggcaggtgcttcgttcagtgaaccttgtgttcagcaaaaaatagttatcaataccagtacacctttggcaccaggtactcaaatcatgatgaatggagcccggtttattgttccaccacaaggtcttggagcaggtagccacatcctccttatctctactaatccaaaatatggacctcccttagtacttaacaatgcccaaggtttaccggcaacaccagtagataatcctgtccagaagatcatacagacatcaaatcattctctaagtggtcagcctttaaagccttctgtaagaaactctacaaagattgtaaactgtctgggaagtccaagttctctctctgcagtatattcaacaccacagatggtaaacacacctgctaaagtttatgtcccacccgcaccaacggtgccattgacttcagtgattaaatcctctccagctactcttttggcaaagacatcattggtttctgccatttcttccaataatcctccactgccaagtagcacatcggtatttcatttagatacctctgtcaaaaagttactggttagcccagaaggagccattttaaataccataaatactccagcatctaaggtatcttcattgtctccatctcttcctcaagttgttgtatctgctagtcaaaatcctgcctctgtcttccctgcttttcaatcatctggttcagagaaacctgacaaagctgcatcttgaatttagactaaatgagccagtttttaaataatggggcattgttttaactcccataaaaattttaactgtttattatactgttgaaaacatattgttcatactgtgtgtctgtgtgtgtgtctgtgtgtgtgtctgtgtgtgtgtgtgtgtgtgtgtgtgtgtgtgtgtgtgtgtgtgtgtgtaggtgtgtaggtgtgtaggtgtgtgtgtatcttcattagcttgcacaagactttgttttcttggggagggcaaaatataccatttcactcattgttgtgaagatgttttccaagattctttgttcaaaatatgtcatcaaaatttacctgtctatataacataaattgaacaaagtcgtttgactagtttaagtaagctagccttttcataattatattgatgtttcttcttaaatttggactgttgtggtgtatctacagtatagtattctgtgtcattagtgacatcttatttttgtttctgtaaaaatatatatagatatatatatttatgcattaagaaaatgcagtccatggtgtaaaattgtacatattccttaaatccctaataatctgtactaaatatatgtacaaagaacaatactgtcttatttatgttttgtttacataatgtatagttttttaagtattttagtaattttggaccagtgaactgttagcaacaatgcagaagaatctgcatataataaaactgagttgctgtatttctttgtttgaataccatttttaaaatgtgttcttgtctattggaagaatacatgatacaaatgaaaacaatcctttaaaaatgtgttaaaattgggaagtatatggaaataatagcacttgcacaggctttatacttaccagagcttcctttcatgtatctcatttgatttccacagtaatcttgggagctgagtggtccgtccacacttacctggttcatggggagcagagccagggcatgaatctgatgcttcacacactctccttagttgtgctttacttttgttttgaagttttcattcaaaattttatggttccagacattaaagaaaaaaaaataggaaaaaaaaacaaaacaccaaattctgtattgaccagaacaaatgtgtgttgttttcagataagaatatttggtttatgtctatacatccaaaacatgtttcttaaaatttttttaagtttctttatgaccctaagtaggcctggaactttccatatagcccaagctggccttgcctcagcctcctgagtgtaccaggattatagacaaatactgccatgccttgcaagacttactttgtaataatctgggttcataagaggttgcaaaagcaatgaagagtggtggtgttacccttcaccttccttctccacatttctatttaaattgaggtcttggttcactgttactgatcttccaaaattatgtttaagtacatgaatttttgtcatttgaaattaaaagtgagcaaaaatattagtgctctttctccttttactcagattatagagcaactgcataaattgtaataagccgattctgttgctcagttggtttgactcagggcttgactttgtagagcttgagaatgtgcctcgttgtaaataaaaggtagctttgtacttactggagctttattatcttcttatcttattaagatactgatatatacattcaacttaaaatattaagcctcatcacagcgttcctctctaaaatttaaaatattagaaagagtaggcttaggcctattcgatagctcagtggataagggtgtttgccaccaaaccagaagacctgagttcagtccccatgtcccacttgatcaaaggaaagaacaggcttaagcaagttgctcactgacctctacacacacacacacacacacacacacacacacacacacacacacacacacacacactaaatactatcttaagatatttttcattatttaaaaaacaaaggaaagagctagagagatgactcagtggttgagagcacttgctcttccagagaacctgggttcacttctacccatacccaacagctcacaactgcctgtaactctagctccaggggatccaataacctcctgtggcctctgtaggtactcccacagcatgcacacccacatacataaatagaagagaaaaagaggaggcctaaagatttccattcagattatatcaaaatgatgtgattaaagtggaaagagtaatgaatgttcctaaaatgttgctcagatttctcaaacaattgttttatattgaagacctaactcaatggtagtgtgtttgcctaatttgtacaaggtaatgggttctacccctggtagcacaaaagagggggagtcgagtgagagaggaaagggttggaagaaaaaaagattatttggtttggaaggggaaataatggaactgtgtttgtcagtgtaggttaggctggctccaaacccgccatctatactacctcagtgcaatgatacagacacacaccgctactcccaccatctcaaaatctgtattcatgctctaagacagtgccttcaccagtgtgcctctggtctactcaatcacccactcctccccttccccatttccctatcagtatttaaaaaacaaaacttggtttttaagagatgtgctgtgggtgatgtttaaaatgtattgtagggggctggagagatggctcagtggtgaagagcactagcttctcttacagaggacctgggttcagttccaagcactcacatggcagctcacaactgtcatgtgacactctcacacaggaaaacaccaatgcgtaaaaaattgtgtgtgtgtgtgtcatttagatgaataaaactgaggtacatgaagcttgtctctaaaaaataaaaagcagcctgactcagtcctcagtttcggaaattttctcagactctgatcttcacagtctctgattcacatccttacattgttcaattttatttcaatttcccatgcttttttttttttttactcacagttttaagttttcttaaaaatgatttctacctaaaattcttatgacagatttaagacagttttttgggggggggcagtatttgtttggttttggtttctcaagacaggatttctctgtacctttcggagactgccctggaactcagtagaccaggttggcctcaaactgccaaagatctgcctgtctctgcctgccgagtgctgggattaaaggtgtgccaccaccgccacccgcctaggctacacctcatagataagatggtattacttgttcacgatatttggctaattggaaaggactattctcagtcagaggaaactagtcatgagttctggctactctagtccccacctggctctcagaaaacaagcagcaaggtaccctgaacccttctctgccataagttgagcacactggtggtggcttgatgtaggttcagttttctttatcagtggatacccaatcctacagtgatgacaaggatctccctctctggggctgtttgttccttgccttttcagtctaggcagcaaaggccttgaagcaccaaattcagagcctcaacattcactgctaatggtcgttagtgtcctagcacccatggatttttctgcaaagctgtttccttattcggtgtgagcattccaggtggggtagactcctttcttgttatcagacagctaacatcatgtggcacttagcaaagggttcccaaggttgcctgcaattgattgtcagtccaagcagtggtcttcagaagtagggctaaattttaacacctcctattcctttcatcgaacactgatttctcgatggtggactcaggccaagcctgttgtctgtcatccaggacactcaatgaaggacacttgagaagcttttctggtgaaaaagagatttgtcggattcttaacagcgtgggaggatcggagaggcctggagatcaagccagaggcccctctgaagggggcgggtggcaaaatgcatacatttgaaaggagaatggggctattttaaatgacgtaagtcaggaaaaacataaatattttttagtatcattgaatgtcatttctgtgtgtatgtttaatccctttaatcttgtctttggtagaaatgttcctgttgatgttatgcttctgtctctagtgacaaaaggtatcttaggtgatttattgacagcattaaataagaaagaatcacatagtgaaaaagacatttaaacagcattgagttttctctgagtcttagtaataatgtctctaacaaagaaagcccaacctgctttcttatggcaccacccaaggtaggctgggctctcgccaccaatcactgatttttaaaaatgccttacagacttgcctacaacccagtcttctgaaggtgttttctcagttgaggtttcctcctctcagatgactttagcttgtgtcaagttgacaaactatctaacacaggaagagagcaggctttgagatctgaagaggaacttcattgggagatagctgccatgtagagccatttaaatccccaggatagaggtttctgagttcagggaggtgataagttctgcaccatgtgacttagcctgggcagatatgtactgggggacaccgtcactgggtcggatcagaagtttatcttgctgttgcaagaggaagagatgggcttgcttctacactgaggcctgagtaaaatcacctgtcagttttttatcctggaaggtcacatggggatagcctgagttctggcagaaagggagaagccagctagaggatctctaatctaaaagggtgatcatagaaattatggcccaagttttgtttcataatagactagggctataaatcaggtggtagagtgcttggctagcatgcacaagtccaaagttcggtccccagcactacacgaacagcctgaggtcctagcacttggaaggtggaggcaacagtgccagcctagtcacgagctatatgagccctcatctcaataatgagctaatcaaaaaataccaggtaattggtacatggatatgacaaagtcacactaagtgaataatgccactagagagtctctgcccctttgtatttattctgtatgttcttgtaagacagagaactcaaaactacaggccatcagggatatggctcagtgagtagacgtgcttgctaccaagcctgatgacctgagtttggatctctgaaccctcataaaaacccaggtgtggtagtgtgtgtgcatctgtaaccccaacattccacagagagatgggaggtggagacaactgactggaagctcacagttgagctagcctatagtatgcatgcagtgtagtgacggaaacaataaaccctgcttttcattgtcatcaggacccacaacagtgcacagacatcaaccaaactaaagttgcttttacttttttaaatccttgcaccactttcgagcttaacagaaaattaatttaccattttttatgagtgttgaagtgaaaatacaattacggggctggagagatggctcagaggttaagagcactgactgctcttccagaggtcctgagttcaattcccagcaaccacatggtggctcacaactatcccttataagatgtggtgccctcttctggtgtgcagatatacatggacgcagaatgttgtgtacatgattaaaaacaaaatcttcaaaaagaaaatacaattatgactaatatgtatggtttaaggtacaggcttttagtaacactacgtaggttttatgtacgttgtacacacacacatatacatgtaaacgtatatgtatgcaagtgtaaggataattacagaaaaaaggtcatgaatttgagagtgtggaggagggacatgggaggagtcacgcagtaaacccttttatccatacctcttgactttggagtgttcattgtggcaccaggcagttaggcactaattcactattatgttgagcaaatgtttggtgtggtatgggaagcagagagacagaatgattcgtgtcctgtggacagaggcatatctgaagagaccaaagaggtcacaagtgggctgacgtggatggctgattgccacccagggccatggcattatctgggcccgggctgctgctgggacctatgcctgggtttgtgactctgatgcagccacagtctctgttgaagttcatggctcctgataccaccaaaggctgagaagacagggctgcacagagtggtcccgcccctcactggctgcaaacactagggagagctggtccttcccctcaccaactgaagcactcaggagagagtacctgagctggtaaggggcagcataatagagctgaagcttgggtgtggggaacatgggggagctggccctgaagtcgtgagaatgggagagcaggtggctcccatcttgtgtgccatatggtggtgagggcgagggaaagataccctctcccccttgccactgccacctgtggtggatgagggagctgaccctcctccttaccagccgtgcctaacctgggcatcatagagctgaccctattgatttggtggtgtgggtgtgggcaggatagattccctctccccctgcccctcaccaattgtagcacctaggagagtggcctctagagctggctctgatggtgtaggtgtggagagtctacctgaggacatgaaagcaggagaactggtcctgctccttgctccttgagaggagggtgaactagccagaacaatactggagagctcaccctggtgtgaggatgagaagagctggcaggctgaccaaccctgcaactaccgaggccccagaactagggttatgaattggcccaccccaatatccaccccatctattatctgctggagctcatgaaggggtcagtcctgcagatccaaagctgcaggatctccacgacacagggcaacaacaggatttccaagagggatcctagtggggccctagtattgatagtgtaacagaaaccagagacctcggaccagaccaatgactttttgcaataaacacttgaaagtaaagatatatggataaaagggtttactgtgcaactcactgtgtcatgctacagcttccacgacaagacttttttcccctttcccccctttttttctcttaaattttattttattggggaagaggcttgcaaaggcagagagtggacacaaggggtaggaaatgaatggactcgagatgcatgatgtgaaagacacaaagaaataaaaagaaaattttaaaaatcttttcacaaagaaatcagatgctcccaggtcatccgtgtaagttctcccctcaacgatgctgatggcttaatagcatcacttccaggacagataacatgcattaaagtgtttattgaagcatttcccaggttcctgtttctcaccattcctctgtgttcctctggttgccctggcaagaatttagcactggcctgttagtagatttgcacatcgtgtagcattctaaagaaaaacatgggcgtgcaccagccttaaagcaaaagtgggagaggaatcatctcagcattctcagacgcttgttgctggtgctcagggtgaatacggtggtggcaactggtccgaagagagcttctcataggcaggtggagcattgggaacctgtgaagatgaggcagggggagtgagtgtgtgtgttgtggggatgaggcaatgcagtttgcaaaatcttcatacatgtttcttgtccaatgggagtaattggtaagtttcacagcgcatattttgaaacggtggtgggaaggggaaacaagagatgagaggctttccaaaaatctaaaagtggatttatgcctagattatccatgtcagaattgccaagtcctaactagaggattcttttttcatttgtttaccttatttacttactttgtttatgggggcagcacctatgccacagcacacatgtgcttgctagagaataacttgaggaattggttctctcctgttaccagggagggcccagggatcaaactcaaagttgtcaagttggacagcaggtacccactgaagcaccccactcacccatgtatccttaaaggcgtatttagggctggggggaggggcagctcaatgatagacatcatacaaagacaaaaccatggaggttggagagacatatttatctcgcaactgaacacaatgtatcaatcattcagttaatgctcacaattctagatgttgccaagtggaaaatgagacagaaaagtcactagccctaggtcacaaacagtaagtcatagagctaagactcaagcaccgttaacctgacttgagaatcaatgtccattacttagctctgcttaactattgggccactgctatagagcagaaatgcaaaactcaaattcctagtaatgtcaccttcagaaagcaggtaatttagataaaatacttaacttgggtcaaaatagtcatttcaacatgaaatcaaaagaagcccgaaatggctctattattttcacatattctgtctctgaaatgtatgctacaaaactattttcaaactactgtgtttcaagtgttcaacacatggtagtggctcagttctagagaagaaaatatccctgggactcttacttgtagggctctcattattggctgtaaaatctaaatataagaagatacaacttaacaaaacctgtttcccattttgtttgcttttattataaaatatacaaaacaacaattaccatttttacctttatggaggaggggcagttgtgtggattgaatctaggccctcatgcaggcaaagcaagtgttctaccactgagctacaatcccagccctacttttgatcattaatggccagttaagagttctgtgacattaaatatattcacattgcttttccgatggaaatcacttggttcactggagctgaaagcagctgacatgaaaatgcccagtgcaccatctccacctaccacaggctgatgggttttttcttgaaaaggcagtgggctatcctgaagaccaagaccatcacatgagcattgctcaccagggcagctttccttccggggactccggggacctgcatgaagccttttgtcctgaaatatagtcataagaacaaaaaacaaaacaaacaaagacaaataagaaccgagtccattaaagaaaagagaaagggaatgacgttttagaaatgggctttaaactagttgctgtcacatacttgctggttcctcaggccactccctttacctctgtgaatgccagttgttacatctggagtagtaagatggttagacccacttctcagagttgttggaactaactaaagacagtgccaaggcagtgcctggcatcagctgtccctcactgggaaattttgaagagaaggggaagactgaatctacaaaatgaacaattcgtgaaaaaaaattaaggaaatgggtctagagagatagctcagtagttaagggcatttgcttctcttgcaaaggacctgggttctgttcccagcaccggcatcatggctctcttccatctatcactccagttccagggaatccagcacccccttatggcctctgtgggtactgtgtgcatgcggtggtctttcattcatgtaggcaaacactcatacacatcgagatagatgaggggggaggaggtggggctagagaaatgactgccgttagaagcagtcatcttgtaaagggcctacattcaattccctatacctacatttggtggctcataaaccaggcagacctgcttctggcctctatggacacaggtactcttgagagcataccaacacatagatatacacacacatatatataatttaaggtaaaaaataaggctgggtgttggcgttacatgcctttaatcccagcacttgggaggcagaggcagacagatctctgtgagttcaaggccagcctggcctacagaacaagttccaggacagcctccaaagctacacagaaaaaccctgtctcaaaaaaaaaatatatatatatatatatatatatatatataaaagatgaaggtgtgttacattgttttctgtaatatttttgtcatgactaggtattgagtagagacaatgaggtttggaaaaactaatatctaaggtcaccaagcaagtcagtgataggcaataaagccaaaccgtgatgccctacaaccaagtgacttttatgtgactgttaagtgagagaaccaaacagtaaagacccaattactaggtagtgtcatcactccataccagaggtgtacaggtggagtgaggtggtggaccgtgaagtccctccccttctcagcatggacagtggcagtatcctgcagtttgtttgtagtcttcttgtccacacttcagtgtgaactcaccagaggactgtttggtgatgtgtgggtcccaatgagccttgcctgtttggtttatattctggaccctccgctaaaatgccccctggtttcctagaaaaagaactttccactagaagacaagtatgactgggcggtggtggcacgcgcctttaataccagcacacaggaggcagaggcaggtggatctttgtgagttcaaggccaacctggtctacaaagtgaattccaggacagccaaggctaatacatagagaaaccctgtataaagaaaaagagaggaaggaagatggaagaagagggagggaggagggagggagggaggaaggaaggaaggaaggagggagggagggagggaggaaggaaggaaggaaggagaaaagaaatgtataatccacacctagggactggagacatggacatgccagggaggcaacctgggcactcagggctggaactcagggttcaaatgccttctagggagctcgagctgtggcttgtactggtggggttttgttagggtctccctctggagagaacagagagaagctttgctgcagcctctcgaagtatggatcagaaccacagagagttcccgcctgagttgagtgctttggttttttttagtatacttttgctgtttctatgacaatgtattttgatgattctatgacaatctaattttgaagtgatgtgtttgggaggggtgctttattattttttttgcaggttattcctggtagcctgtagtgacctgaactctgccctcctgcctcagtcctccttagtgtgtaaattacatacaggcgccaccattcctagctagtagttttaatttttttaattttatttattaactttgtgtctatgactgtcttgccaaaatgtatgtctttgcattcctggttcctgcagaggccagaagagtcccctgggactgtagttacagagggctatgggccaccatgtgaatgcttggaaccaaacctgggtcctctggaagagcacccggtgcacctcccatccagtggttttcatttttatttctttttttttttttttttttttttggtttttcgagacagagtttctctgtgtagctttggagcctgtcctgccactcgctctggagaccaggctggccttgaactcacagcaatctgcctgcctcggcctcccaagtgctgggactaaaggcgtgcgccaccaacactggcagttttcatttttaaagatttgtttttactaatccttggttttcctttgagatcacatttaaattttcctaccttgctgtgccttgctggccccaaaatgcccaaacttcattttggacctacacaaatgttcaagtttttaaggccaccttctaatgttagcattatgacaagtttgcacaagctctttacaggaccaatagacagacggatagatggctgaaggatgcacatgctctttaaggaccaatagacagataaatggctgagggatgcacatgctctttaaggaccaatagacagataaatggatgagggatgcacatgctctttaaggaccaatagacagaaagataaacggatgaagaatattccagtggtgcatcctgatgctgcaagaggatggttttcttatgctgatgtgatcatcatcagtaagactttggatatcatggtatgactagttagtatgacagttagaagaacttagaatttggcagggagatacagcacagcagagaagaatgtttgccaccaggctgataagttgagtttgctcccaagccccacatggtggaaggagaaaaccaactccaaaaaaggttgtcttctagcctccacaccccataccatggaatatgcttatgcatgcacacacatacatgctcattgccagaggctcagaggaagaatgggaccctgcaggggaccattaccctcaaggttcggtatccacttcgtcttctacagtaccagcagccgatgagcagagcaattcccaggaccacaatcagaatgccaatccctgcggccctggaccaagagatagacatgtccaacacagctcagaagcatcgttccagacggcaatgaaacaacctacctcctcccttttcgtggttcagaaaagagtctttcagctccaaatcgttctccgttttccgtgcagggtgcccaaccagactcccagctccagtgtctaaggcagggcctagtttaggagcctttacattgcagcaactaagttccaagcataaggggtgccccggcacctgacccttatggcgacagtatatttcctgaagtagaatagccttttcttctcaacacagcttttttaaaacaatttttccaaatcaatccagaaaaaggaagtagaaatgaataccaactatgagccgctgtcatgaccctgcagcaaggaacctatcattatctccacttcactgaggaaaaaataaattcggagaccagtgactcgccacccagagctatcatgaggcagagttggagtctgagcctgagaccacccctgccccatactctgccctgtctccttgtggcccagggaggagagtctgagctggacctagtgcagcgtgctgctcacttatctgtgtatctggtcctgagcatcagggtgctgttctggggctcttagccagctgctgtgtcctgtgtccggagttccctggaaagcattacagttgctgcaaaggtccctggaatagtgtggcatgtgtgctcctgcacgccactgccagtcagctggcatctgcctgatactcagcatgatccatactgaggaccagactgaacttgctaagaaatgctctgccgagctggggaatgcatactacactgagtggccacagcgggcgcaagggtgagaaggaaggagttttgccattaccacctaccttcatctcagggctgccgaggcatcaagtttatcctgtccaactctagatgggatggagagacctgggagatggctgtaccagagggaaactctgccctagtcatgtaggtcaacctacatgtagagcttccaactacatgactcaaacacccaggtcccaggcactggaacatccaggctctgtgctgcccaaccccacatttcattttatcctcacagcaatcctctgacctaaacatagagcattttgcagtcaacattaagctgtcaaaatgctcaaggctgcacagccagtacatggcagaaccagcagagtaagtggtactagacagccatcaaggaagctctaggattcaggccggccagacccaggtccactgtccagtgctggcggggggggggggatccatctaagatgatgctgtctcaaggagagttcgatgactcttatgattgaaggcagctgacacaattcccagcaggcttgtgctctaacttcgccctctgctctttctttgagtgtcttgacacagacagagctctgttccaactctttgtgcacagtcacgttgtacttagagcacacacgtgagtgactgaaagtgtaaaacatcaaagaatgccagacaccccagaggaagccactgaggaagcagagccccccccagtcacccagacactggcagcagtcacttgaggtgtaattaaagaacaggtcctggggccccatgtctggcctaaactggctctttgtagaggtagcacctagtaatctgcatttaggctagctccctggatggcttattcccactcaagtgagtaagaacccctgtctactgcggcttcagagagagctgtcagcaggtgggtagccctttttgactggctatgggagttcactgcataccattctttctcattgtacccctggcaaattttaaaggaggagaaataccctccgagaatctcagagatgaattgcttcaatacagacaattctgcttcccgtgtgtcccaccctccagtttaaacaggggccagatgagtgagatcctgatactggtggtcttgtgtggtgattttcttgtgttcttcactggtctctttcacaaccctgcacaaaatcatgtaccatggtgtttcaggtacttgacggttgcttccttcaaggactgaggttaaaagtgtcactgcactgtgttggggcctcaggtgatgtcaatggacatgatggcacccacatatgaagactgagtggctgtttttcttctgtactggaacctgagacatctctgtgctcttctgaccctgcataagcgctttgcccaggatgtaagaaaggatgagccttcagtgaaggggttactttacgcgaggctaataaattacaggtgcccttagtacgctgttgtctccaactccaaacccacctgtctttgccctgctctgggatgctggcactgaaccctgcaaaccctacttcctctttgccgcgggcccctgcagagtgtcccagaagagtcccatttctgttcaacatcacccataagccccctttcacactgctagtcagctcagttgccagctgtctcccggccactcccagaaccggcctctccatgctgtcactagctgatgccactggccagacgcccgagcacacagaaaccagccgacagaaatcccccttcagtcatgtgggccccattccctggggtttctccctccattttaggttccgatgacccctgcttttccatttgttcgtccagccccagggacataagcagcatcctgcggttttgctgaccgtgttacttctgtgcctttgtctcctcaaggcccccacctgcttaaccagttcctcataccgaaggtgaaatgacttattggtgtccatcttccttcctagactcggggagtaattttgcattggctgtggggccgctactagcttcaccggctggaaatgagggctacacaccacaaaggcttgcagcttggcagtttgcaggtctctttgaatgggagagtgccaacatttgcctttgttagctggtgagcttagtgcttcgtggacaaacagagcagcacttaaatcccagcatcgatacattctgttgcacatatctcctaacagttgcaaaactacagttacaaattagcagggaaatcactttatggttggagccaccatgacacgaggaactaactgtattaacccgtcacagcattaggagggttgagaagcactggtctaaagcaaagcctggctggactcccctgctcaggtttgcctcctaccacgcccttctcattcctagagttgcttcctgcctaactctcccagtggattctggactttttcagagatatagaacagtatctttgaaccatgtacttagttcttagaagtaataatcgcataaatacttattattaattaacttggaagcccaaacatctttctgtgggatggcactatggtgcaaaagtcatggccaccatcttcagcctggaatctgagaaccacacccgggcccctcatccatactggctctttagcaacttaacactagtctgtctacaatgtccctgcagcagtcctgagtggagctgataggacagcttgaggaaggaagtgtctgggtcctggacagatgtttcccaaatcaaaaaccaacaaccaaggcccgagaatgcagacataaatatccatatctaacttttctcacttctatctcccaaccatttgggagaggtctgagtgaaaccattataagacttgcaagtctccctgggtggccggggttggcatttgtgggtgggagtcagcaggctttgtctgcaaatagcaaactggaaaccccagaaggtctgccttttaacttactcctccgtggtgatgtaagagtggctgtgctccttcctggggtaaccgaagtgagcatcttctcgtggcattgtgtggactcagagcacaggacacctaaaggaagggtacgtgggcattgtttagtgtgtccaaaacatcctcaccatctcacagagacacggagactgtccccccaggatgtgtcaactagcataccctctatctaggtcttccctgtggggattcatacctcctctcattaattccaagagctttagaaatagcttaggtttctgacaccttttaatgactgggagtttaagttctaagaaagtacaaatgaaacaaagcactttaaaaccgaattatcggggagtgtgtctctcaggccttcagtttgactgtaagataaaatcagagaggttttttttttgttttgttttctctagctttactggcctagggcaacagctaatagaacaagaggtggggctacaggggtgagtcagtgtgtgaagatgtttgctacacaggtaaaggtggaagatggctccatggcattgtcttctgagccccacagtccactgtgacactcgtatgcgcgcgcacacacacatgtacacacacacacacacacacacacacacagacacacacatacacacacagacacacacacacagagacaaacacacacacacaccccacacacatgtgtgcctgcacattgtgtaatatacattttaaaagaaataaaagaagctaggcagtagtggtgcacaccttcaatcccagtactcgggaagctgaggcaggaggatctctgtgagtttgaggccagcccagtctacagagctagttccaggacaaccagagctacacagagaaaccccgtttccaaaacaaaacaaaacaaaacaaacaaagattcattatttttctccaaaattacctctgtcctccatctctgtccaggcagaaggttaaaatgctcagtgagatgttccccagatgtgtgcgctagtgacagagcatcttccaaacccatttttcaacaagacaaacctagcaaggccagggcctcatgtcatctaataattttttttcccctcacattcaacattcaattcaatttctatctatacgggtctcatggctaggaattaaaaaaaaaaatttaacacagagtctcactatgctaccctggctgttatagaacttagtatgtagattagactgaccttgaactcataaagatctgtgtgcctctgctttccaagtactgaaattaattaaaggtaagtgccaccacatccaacccaaacacacacacacacacacacacacacacacacacacacacacacagtgtgtataaagaataccaacaaaaatctcatggactacagtggtcataattaaagtgagctcattaaaaagcaataatggaagctttacatttttacagttttccattttgaagaacagggaggatgggggagcaaaatcaggactttgttttttatcacctgattcttttccacaggggacattttgcgtgtaattgtccttcccaggtgtaaaaaagaaattacagttgatctcacgtatcatctcaggtgggtagtgtagaggtgaaactcatgttaacagacaagagactcacttaattctgcattgtttctttgtatgcatctccctcaagctcagagcctcggcaaacagttacaggacaagtgtacctcaccccactcaaaccagcagaagtcactttgggtgacagactacatctagtgtaaaggggttcctgtcaccagcaacaacccccaccccccaccccgcactccgaatcgatattcttggcaaccttagaggactgagagaaaatctaagagactgtgaactccagaagtgagacaattacacacagggggagggggcaactctgctgacacttgagattcaagaaggccccgatgggggacaaaggagtcccccaatccctgttctgaaagaagccagtgctcttaccttcctgaggagacaggcctctgcgtgctgactggctgtgtgtatgaagacggcttctctggctattaatctaaatttttttttcattcttgatcttgagtctcatgatagtcatgggtctgaattcctaatgggttgtctgtgattgcttatttggcatgaaagaaactaacttcattataccctttagggaaaacagagagagagagagagagagagagagagagagagagagagagagagatcactcttggtggtggtggcctatgtttcccaactggcaacactttacccagggaagccatgcatttttaagttgcccagtaaactacagggtgtctaggtaaacttgcatttcacataaacaagtatttttgtcacgcgtctaatgtaattttttttttttttactataaaaatgcctcagcctggaagtgctcagctctaaatgtgacttgtatgtcacactcctcaatgttctgggatcttcaaggacgaggaggcagaaagattttaagagtcagaggcggtggctgacgaatctctagccacaacagggcagatgcactaaagtactcagaaattctgacagcatgcacaagacctactcaaatcagacaaagcccaccactagctgaggagtattcaatagctgccaaagggagagtatgggttttcattaatggggttgacctatggcaggttgaccgaactctagggcagattctacttccaagagtagttgggcaccataaactatactccaagggtgaagaggaagaagaggaggaggaggagagctcaaagttgggtgggcagggaggtaagagtggagggtgggtgtaggaggaggtggaaaaggaatatgatcaaaatacattgtctgagattctgaaatttttaagaaaatgttattttaaaaacatgtatcaaaaattttttaaatgtctcatatattattgggataatgctacactaaaaaattctattttgtaaacagagaatggcagctgatgcctacaatgccagcacttgggatgctgaagcaagaggatcacaagttcaaggccagcttgggctatatagtgagacctgcttccaaatacctatatagtttatctgaagcccaagcttaactgggtgccctacttgcaccccaaggaactgaggagtttgtaggctggggtctgggaaacaagtcccaacaatccatgtcctccttgttttcggaggccctggagctaactgtccactgaggattgtgagtttccacgcacttgcaagagacagatgaaatttccctttccaaggcaacctacttggactctcactaaaccagggataattccacttacctcaaaatccaatatgtagtaatgagacagtggtaacctttgctaactggcggtccctaaccatcacagacagacaaatccacctcagtttaaggagtacaagagtcttcatctgctaggacttgggtgaccacatctgagggccatatcctctcagaacctatggttctagtttccatgctgggctatgaacaagagcctgctttgtgtgaggataatatgagcctactggaaacttagcaactgtcactagaattagcaagggacacacaaaacagagaagagagttgttcctaggggaagcttgtctgctgtggatcaatctttgtataatgtaaatacctattactctcattggttaataaagagctgactgacctatagctgggcaggaagagattgggcatgagagccagactaagaggacactgggaagaagaagggtggagtctgaggagacaccatgagatgcagagcaaacaggatgggaagtacatacatgaggtaaacaagcctcagggcagcagcacatagattaatagaaatgggttaatttaagttataagagctagctaaaaacaagcttaagctatcggctgagcatttgtaattaatattaagtctctgtgtggttattagggagcgactgctgtgacagaaaagtctggctacatctttctgcaaaggacagacactttaaactaagaactaaacggcagagaggagaaggccatgcttttcattagggcattaggggtgtggctctgtgacagagctattgtgaggccctgggttcaatccctgaccatgttaacaaagaaagaaagaaagaaaagaaaagaaaagaaaagaaaagaaaagaaaagaaaagaaaagaaaaaaggaagaaaaacatctcaggtagaacaacggtgcataagcactgagacaggaccagagcatgagttgggcacccagaattgggaccgggtcagcagattcttaaaaacctacagtctgccctgcctccaagatgtcctagggcagcagtggcaccaaatttgtgggagcagccaaccactgtctggtttaagtcccactccacgagacaaaacttataccttacatttcacgggtgaccaagaccgagacactagataactcagagacctagggtaaaatgaaatattactggtctgaaaaaaaggaaaaaagccattaagatgagtcctaatgaaattctgctctactcagatcagtgctttatccaatcatcagagagggttcctccggcagcagataggagcagatgcagagacccatggccagacactacatggaaagagattctaaatgggatgtctccatcaaatccctctcctcaaagctcagggaactccaagaagaggatgcaggaagattgtaagagccagaggggctggaggacaccaggagaacaaggccctctggattaactaagcaaggcatgtatgagctcacagagactggtgcagcaaatacagggccagcatagcatgtgtttgtactatggcctctgcatatatattatagctatttgcctagtatctgtatgggactcccaagtgtgagaactagtgggtctgtgattcttgtgcttgctcttaggactcttttccttcttttggggggtctttccttctgttggcttgccttgtccagctttgatgtgatggtttttccttcatcttagtatattcttttgtcatgttttgttgtcatctcttagaagcctgttgttttctaatgagagacagaaacagagtggatctggaggggaggggtaacagggaggaacagggagggaggagtagagaggggaaactaatcaggatatattgcttcaaaaaacccattttcagtaaaaaaaaaaaaaataaggaaaaggggatataaagcttgtaaaggggagtggaggaaatctagatgagtaggggtataggaagtgaatatgatggaaatacattgtaaattttcaaagaattcagacataatattaaaaatatattaaaaactgacaactaaaaattttattttttaaaatctcattttacaagtgtaggtgttttgtctgagggaatgtgggtgagccccaggtgtgcccacgaaggccagaagagggtgttgcatcccttggaacagttcggtgtgagccattatgtgggtgctgggaatggaatccgaggcctctggtagagcactcagtgctcttcactgctaagcaatctctccagccttccccctccctttatttttttgagacagggtctcagatagtccgagatggccttgaattcactaagtgtagaaaatgacaaactcctgctgtcaaggactgcaacggcagacaggtgtgcccccgactggcttgtgtcaggagattttgtgtaacagttgggagggatgccaggcctccagtattgtcacatctggaagcagcaacttcaatctaaacctcagggttatgtctgtgatctaactagtggtaattgacgatctacaaagatagctgcagttctgaacttaggaatccgacgtttgcacccgggggactctacaaacaatcagggtgcctggatgattagggcaagaccactgagaccacgaaggaaggggggcaaagtcaagctcccaggtctcagtcgcatcctctggtggtgtgagccgattcagagaatttgagtctgccctggcattcttccagggtggggacatcaactcttcccaccaacggtctctatggacagatgcagcatgctgatggtgctgccactctcctggtcgtttgttttgtgaaacccaaggaagcagccatcaccagatcttctacaggcgtgtctttgggggttttagttcctctggggtaccccggttctttagagttatagtacccaaatgatctttgtgcgggtgctccgggaacctcagcctgaaaaaaaaaaaaaaaaaaatcctaccacatcctgtttcttggactcacacaacctccgggaagtcctctctgattaggtcttagtcattgtccttggactggcctcaagcatgctggagccagcccaagccaggcccaagcaccactaactattcttgttacttccaagggactgattgccttttcttctccaatgaacagctgaggctgcaatccaaaaggcctggcttgctgctcatctcttccgtctgagctctgatctgcacaggttgatcgtgagagttaataaggtagcgcccttgagtgctcgcacagaatgtgcttagccacggcggagagagccggtccacgaaagtgcccacaccccagcttgactgccagccctgcctttttcccaggtgggaactcgcaccacgtacctcccaggccactggctggttctctgctgccacctattggacactccctagcgccccaggcccgtttcatgaagggactagctaacgtttggccctgaatctcagctctcaccatttattatttgtaccatctcacaaaatgatctccccctctgagcttcagcgtccttatctgtaaaatgggaagaaagaaaaaaaatcacggaattgctagctcagagcctggtagcttacttaagctgaaggaaggctggtgccgctgaatttcctgtacttgaaggaagaagccaggtaggtacgcatgggttggcagggtcatagctaagtgtcgtcctaactaaaagccactgcctaggttccggtgacattggggcagtgtgaggtagagtgatgcaggctgtctgggagtacctaactggaagcccttcgggcctgtttttccttcctgccacgctcaagcagcagcccacccatggcaaacagcttgctcatcggtgagacacagctctgctcccaaggtgagcagagagaaaaagaaaacgtgagatcccgtggtcgtagtgaaccatgtccatgtttgctctgacatcagatggcaaaccccagattcttgtctgggagagacatgtgggggtcttggttttgtggggcaggaggggtgaaagggccaagagaaaatgggcttctctggagtctggaaaggtgaagcaggggtttaccaggctcgaaaggggcgttccaggtggaagctaagtgtcattcatgaggcggggtgatggtgggaatgagcagtgacggggagggctggatgatggggaactctgtgcctagagcgccccgcatgagaaggagacaaagaaacccgaggtcaggttttggtcttcagagggcctggattgccacgaggcttgcggtggtttgaaagaaaaaggcctctaaagggagtggcatcattgggaggtgtagctttggtatggccttgttggaggaagtgtgtcactgtgagggtgggccttgaggtctcttttgttcaagcttccctcagtgtgacactgagatcgtttcctgttgcctacttctccaggaccaggtctgcctgctcgcccccattcccacctccgcccccccccccatgatgacaatagactgaaccgctgaaactgtaaacaagccacccaaattaaatatttttcatataagagttgccatggtcatggtgtctcttcacaggaataaaagccctaactgggacaaggatgttggacggagttggattttgagtgacagagtttcaaggttgcgcatcagtctactttctgtgtcactaaggtacccgccactagggggcgcgggggctgcctgtgcttcagtgtgggtggtcatttggtgaaggaccaaaggaagcagcttgacctggacaggctggacactgattggtgatatgaagagcacacaggagacatctggggctctggactctgaaccaaacgcttgctccagcgttggctggttctgcatctttgggtgtggaagaggtttcttctgggaatgggaactctgcccacctcagggaggctgatgggtggggtcagtggacatcctttgtctgctggtttccagtggcagaaacttgaacctggttactgagggaaatggaaggcctgtcaccacagaactgaaaatgcttagtactagaacttaggaatggccaggtgtagtagtacacacctgagatgctagcacttgagagacagaaccaagaaggcagcgcattcaaggccagctggaccacatagcaagaccattcaagctatgaccatcccagagaaccagctttaagggccttcgtctttgtgtatgatatcccagttctgtgggaatcttggctaccttgggtctcagggccggtcctgggctgtacgaagaggcttggggtagaagagagagagttaccggctgccaaggctgatgacgggaaaggaggaattctttagatgtttagattactgctacaaaaacaagaagggaaaggtgcaagagagacaaaagactacttctatatcagatagtggcctccagttacaggatctgtctttttaaaggggtcctctgcacctgcgtgcagacttaattcccatggaaccttgggctgaccagggtactgcctgttccaccaggtaacaggggcaggccagcataatgcctgaacctttcaccgggttcatgaagccaggacttgcccctgaccagcttttgccagttctttaaaagggctgcagaaggaaccgaatcgtatatatggacatcctgtaggagtgtagcgaaggctgccagcagctctctgtttatactcacagcctggccctcactgtctgcccacatttgcagtctaccatagttattctacagatagagttataaatctctgtacctccgtgaccccgcacactggaacgaggtagagacttgaagaccaaagtgttgctcagctctcatcccaagaggcttttaaaataatctgtatcatcaaggcaaagggtgcggtcattcaacagaaagggcaacagctgtctgcttctgtttgttttttttctggatttgatttaagaagaaaacaaccccccccccttactctacccaaccacggtcgttaatagtatagtatctttcttgagcacacagccttcaacagctcctcccagcaaaggattctcggatgggggggggatgggaggggatgctcctgagtgagtcaggcagatggtcttgccctggcaccactggggatagacatgttctttatgcctccctctttagtatcaaagagaaaaagggttagtaaaacatttgcaagaatcgagtgtttaagtgtaagggaactcaccttccctgtatcactggagctctttccttggctctctgtccagttataaactctgtgtatgaccccacggggcctagtttccaagacattatgaggtttgtggagtttttagaacttggtgacaggccatttaactgaaaactatggctgtctcagcaagaggggcatttcgacctgccccaaacctttctaagctcctgttcatatttaaagtttctggagaaacagcccccagacagtgaacagatcaaaatagccacaaaaaggaagagttactatgtacagagagaacaacccaagcatttgacagaactcctgccctaccacgcaggggttaagacaaggtttcctccttagggtgagatcttatgacttcaagccttatattagggaaaataaaggggaagttgaaattgcccaaagccagttatgctctatacatttttaaacttttttattatttacttacatgtatgtaacatgtgtttgtgtgtgtgcccaaggaggtaagaaagggtcagctccctgctggagttccaggcagttgagagctgattgatgagggtgctgggaatcgaacatgggtcctctgcaagaacagtaggtgctgtcaaccactgagcattcctctagcccatgccttatatttagtaggataatttgatttcttttcctacttatattctctttatttctgtctcctattttattgttccaagtcgtgcttcagcacacagtatcagaaaggagtggggatagtggacatcctgctcatgtctagatttaataggattgcttcaagttgacctccattcaggatgatattgtgtgcaggcttgtcgcatatggcctttattatgttgaggtatgtttcatccagtctttctctctctgggactgttatcacaaaagcatattggattttgtcaagggatatatatatatatatatataatatatatatatatatattatatatgtatgtatatatatagtctattttcatgtgatttttatctttaagcccatttatataatacatttattgatttatatatgttgaatcatccatgcatctctgggatcatggtggaaaatctttttgctatatgcctgtgttcagcttacaagtatgttattgagattttttaatatatgttcatcaaggacattggcccgtggttttatttttttgttgtttctccacctggtgtcctagtttgccttctattgctatggtaaacaccattcccctctccccaaaatggagaggaaagcatttatttggcttacactttcaaatcatagtctatcattaatggattcaaacagggaggaacctggaggcaggagctgatacagagcccatgaagggtgctgcttactggcttgctctccatggcttgttcagcctgctttcttatagaacccaggaccacctgcccaggggttacactgcccactgtagggtaggctctgattttgcctattttttatattttccaacctaatcacaagttttagttttgctttgtaatattttagatttctttggctttccttgtagagtttctctgctcatttctgattgtgttcatttgggtccttgcttgcttgcttttttttctttctttggttagttgggccaaaggtatgtcaatcttgtttgttttctcaaagaatcaactcttagatcattgacttgtactgtttccttcatttctatttaactaatttctgctgttttttttttttaagttgctccttgctgtctactatatatgggtttgtgttgttttggtttttctgaaatatttagttgcaagtaatttgattggcctgttttaattttttaatataggtacttagagctataaatcataaataatgtatcactacagattagtggttacatttctcttttgatagtgtgcagagtaccttcctgcaactgagacactgctctatgcaagcaccagctcaacatcccatgttcaatggtggtgtgggtgctgtcttctacagtggggcctttctttcactttgaggacaacaacctattgtcttggcagcagcctttattgtttggggatttccactgggcccctttgtccaacagtgcatttagatgtaatttaatctaggtactagaagcttcatttggtgacaagacatggccagttgggcctctgtctcccccattatttgatgattttgtttagatctaattgatatatgaatatattttagaaggtttctactgctttaggcttctacaccacccccaaatattctgtattgcagctagctctttccacatttcctcccactacttcttcttccattcccttccctcattgatcctctccttccagaccccaccccataactattatatttcttttcctaatgagaactctttgctccctctgttgccttactctatgcatacacactgtgagtctttggattatagctggtcatcatcggcttaatagctaatattcacttataagtgaatacacaccatatttgtcttactggtatgggatacctcactgagggtaattttttctagtttgatgtcttttcctgcaaatttcatgctgtcctttatttttaacagctgagtaatactcttttgtgtaaatgtaccacatttctttatccatgtttctgtcgaggtgcatctaagttacttccaatctctggctattatgaagagaacagcaatggacatggttgaacaagtggtaggatgattcatcttttgggcatatgcccaaaagtggaatatatggttattgacataaattgatttccatcatcctgaggaactgccacactgatttccatggtgggtgttcaagttttcactcccaccaacaatgtatgagtgtttgttccccttacttcccatcctaaccagcacgagaagtaacttgttgatcttagccattcttccatgtgtaagataaaaatctcaaagtagatttgattcgcattcccctgggggctaaggaatatttctctctctctctctctctctctctctctctctctctctctctctctctctctctggttttttgagacagggtttctctgtatagctttggagccagaactaacagagatctacctgcctttgcctcctgagtgctgggattaaaggcgtgtgccaccaacaccggctggaatatttctttaaatgtttctcagccatttgagtttactatattgaaaattttctgtttagatctgtacttcatttttatttgggttattttttcttgatatctaatttcatgaattctttatatattttggaaattagccctctctcagatgcgtagttggcaaaaatctttccagtcttggtgttatctgaagttctagctggagtagtctacgaggctggaccatcttaactaacttctttgaagctgttctgagtagtttgcagttcaaagctgatctttgggtggtagtgtttgtcagcttagtggcattaccacaatccaggcagattcattgttatggggccccaatatccttttggagacttcaaaggtcactgttaggaatgatcaggattcattgccagaaacttaaacgttttaagtgtcatatgcagcagatcttaaagaggttaaaggatcaatatttgttatatacatccagagcacaaaaacttaatttttagctacctgtgagagactcatacctgaaatcatgtacaggaagctagatgaaatccttagtacactatacgaccattaatatcatgacaaaaggtttaaatatgtatgtattaatcataaattttgagataatatttataccttaagaaaagttttaaagagtcaaaataaaaccaaaggattatgagattatgagattagtggccacagaatagtctctaactttggtttttcttctgtcccataccaggtggctcttctgacatgagacagagatttcagtttttcctttaacaagcatacttgggtttagagaaggtgagagccacaatccaattccaaagccagctttaatttttaattgaattgggaatacaaaaagaccatttgtcttatgtgtctgtagacacagtagagaaaaatacttgggaagatttatgaaattttatcctattggaagtgtgctatacatttaggccaatttgttctttttcttggggcattttctctggatgattcactcttcttcttcgtatgtcccatgcgtccagtggtcttcagattctctctctctctctttttttttttttggatacttttatttttcctggaaaaccaaaacaaaactctgccccaaccttaactttgtggagtttctctttttggcaggttgaaaggccttgctatttgatgaatatcacctctcctaaccaagaggtctctcctgtttgaatctaatctttatcaatcttgatagtatccataatttttctcctcctgtggaaacaaaagccaaacctcttccctaacataacacatatcttggtttccattctgaggtcaacacatctttaaagtatccaggctgatttaattcagcagtttttccattatccaatgtactctccctggctgtttcctgtctcattggcatttaaaaaatttaaagttaataaaacatagagagatggctcagcatatctagtcatttctaagtatcacttatgtcttggaattctcactggtgttttctaaatattttattgttgtctgcattggattgttcttcttcaagtttggatggtttatcttctctctgatccattctattggtgagatttcctacagagtgagaccctgccaaaaaattaaaagcacaattcagcaactgtgattttgaaaacccaaccatgttttttttaaaaaatcagaaagcatttatactgtttccctaagtgtttctctttttaaaatttcattcaaatccagcacagtagaaaccaataatgacatcctggcttcgagaacaggagatagaaactggctaagcagtttagggtagaggaccccaaaagtgaaaaaccccccaacctcctgaataaacaccaaaaatgtccttgtccccttggacaacgccatccttagaggccaaagatgctgaaggtgtttaagccaaagtgtttttagctctacctgagaggctacagatgcatgaaaaggcgtggggtctgatttcttgctcttctccctaaatgaatcctctttcctggaaaccacatgtaagaatatgactaaaactgagaggtacccagactccttgtaattgggaactacagttcatactccctctgaatatcatcaagtaaagtcttactaactctaaaccagtggccctcagtggtaccccactcccagggacctgctcctgtggtatagggctctctctctctctctctctctctctctctctctcaaattcccttgtaggaatctataatagatttctttctaaaattcagcctctgggatccatgaatttcattcttcaaatttgtggagtgagaccctaaaaaccactggctcattatatgagcacccagcaccccaactcctgggcttagttcatcaagagccaagaaatggtctgtcactctcaaggacacccccaaaatttcctgtatcactgggataacctttaacgaatttactgattttttcatatccagtatttttcttttccaaagagtctctctgtctctatccctgtccttgttcttatttctctttgtatctgtctgtctgtctctgtttctctgtctctgtcttgtctgtccatctgtctctctctctctctctctctctctctctctctctctctctcattcatacacatacaaacacaaacatatacacatacatgcatgcatgcgtacacatatacacatacatgcatgcatgcgtacacatatacacatatatacacataaacatgtgcatatacatacatgcatacacatacaaacacaaacatatacacatacatgcatgcatgcgtacacatatacacatatatacacataaacatgtgcatatacatacatgcatacacacgtcatacatgaacatatacatacacacatatatacacatacacacaaacatacacatacatgcatggatacatacacacatatgcacaagcacacatactgtctcacacacacacatgcatatacacacatacatactcacatacacacatgaacacacaaatacatacatatactctcacacacacatacacacatgcacatattctctctcacaccatacacacacacatacttaaacacacacacacacacacacacacacacacacactctccctaggctagtgtgtgctcattgctcttcaggaaaagtaagaacgctctggcccagcgcacagctgctgaccacactgcttcagtcatctgtgactctcgaacagagccccacagactgggagttgccaatgagctgaatgtattggctcacagttcagaaggctgagaagtgcaacatccaggggctggcatctgccagtggcctcttgctgaggcatcccaaagcagacagttctagtctggaaaccagaacaactgcagacatggagagtgtcagactccttcctgtaaccaactgacaaattccctcctagcctaattatctcttaaaagtctatttcaacaatgtcacaatgcttgcatttcaacatgaggtttgtgtgtttatcgttggatcccctgtgtctgtctggcttgaagctcctgttttcaggcaacctttccaccttagcttcctgagtagctttgtgtacaggcatgtttgttagggcttctgtgtgagtgaggggctcattcaaaacacaacaaccaacctttccctttaataccaaagatttcctaacctaaaatagggtgaggacaaagaggaagtgtgggtgtagtcaaggcagccaacccttccaatgacttcccttgagcaggagagagcaggttatgggccatataacttagcatgctgggagatgtatccgcagctgaaggtgccagaaggcaaggactgatacctatagcagcacttgccagaggcaaagcagcagagccctggttgagcctctttttactgagatttgttcccagaattccaaggaaaccagcttgaaataggagttgaactgcgaaacttctccaatgtgtgcttgacatgtccctgaaccacactgcctgtcctcccaccagagctcatctgaaggtcccaggcagccaaggaaagcagtgtgtgtgtgtgtgtgtgtgtgtgtgtgtgtctgcgagagagagagagagagagagagagagagagagagagagagcacacgcgcacacacacctgaagaagtagttcggagcccttcagacttaccctgttttgatctgaaatctcctttctattattgctcaaaccaagcaacattgaccctttgcagtcactgtcacaggcacaatggttctctgatcatctcatttgatagcttggctataacacgataaataaaagacccagagactgatattaaggttcaagcttcaagctgaagttcagaaaagcaaagcagatggccactagctctcacctctagctcaggctgaaagggctgatccaccagctcttcaccaaacctcaaactgctgcctctcctcagtatgactggagaatgactatgtcttcctatccttaatgtggctggagaatgaatgctcctgtcctcaatgtgaaagcctcctcctgactactgaagactctacttctaccttttataccattctagtgctgggattaaaggcgtgtgatctgttactcttttagactgattgaattttgtgtatccctgggtagccttgaactcagagagatttgtctacctcttaatcctgagtcctaggattaacgatgtgtaccaccacctcctggcttctggctgctggggttaaaggtgtgtgcctggcttttctatgccttgtggctgactttctgaatcttcaggtgagctttaataactcataaataatatatcactacacttggcctacatactacacttgaagccatcgcccttgcctcctccctggacagaggtggtgtcccatatatgaccatggctgatcagaacatgaaaaacaccttgtctttggggtcagcatgtggctttttgcttataagtactagtaactgcctttccatgaacctacatattcacacacacaaaagcagctgccatgtgccatctcagaaggcaaaagtgtgtaacacgaaaaatagaagaccctaagactgatggtggggttcaagcttcaagctgaagatcaggaaagcaaagcagctggccactggctctcacctctacctcagatgaaatggggcaatcttcaaactgctcctaacttcactgctcctcagattcactcagactgctatcctcggggtagctagagactcatcctgagactaattctcagactgaatacctctaccttttatacctctcaaatcctgggactaaaggcatgagctctgattcactctccggtagccctgggtggtcctggactcagagatccatctgcctttctcctgagtcctgggattaatggtgagtaacatcactgcctgagctctatagcttgaggctggctttgttttctgaatcctcaagcaaattttaataaatcataaataatgtatcaacacaaaagtgtatatattaaaagccttttttaatggctgggcagtgatgatgcaggcctttaatctcagcacttgggaggcagaggcactcagatctttttgagtttgagaccagtgtggtctacatagtgagttctaggccagtcagggctacaaagccagactgtctctctcacagaaaactgtggaccaaaggtgtttgaactgctcatgttaaagatatctactatgagccaggcattggtggcacacgcctttaatcacatcactcgggaggcagaggcaggcggttctctgtgagttcgaggccagcctggtctccagagcgagtgccaggataggctccaaagctacaagagaaaccctgtctcgaaaaacaaaacaaaacaaaacaaacaaacaaaaaaagatatctactatgatgttactataataatatgatcagttagtaaatagtgactgttgattaaacaaaagaaatagtttctttttcctcttctggggacggtgctaagaggcactccgaatggtccagcatttgacaaactctcgtaggctttcctacaatatagcctctaacaaaacctggctgtctcgaaccccgggtaataggattgtttacctttacaccaagaaggctgggaaagcacctaaatccacatgtggtgtgcacccaggcaggcagacttccactgttcatgtcataaaacccaaagtccctatgaaatggtctaaaacaaagaggcagtcatcagggcctactgtgaccccatgagtactatgggtacctgttacaggatagggtatgcctccttactgaggggcagaaaatcgttgtgaaagtgttgaaggcacaaacacgcaatcagaaagacatctaagaaatctttgctaggatctttaaaattctgatatccagacccatgtacaaaggaggtgtgttttcccaacatgtgcctaaggtcatgcttaagttttcttcaatctgaatgcttgttgagaggcaacttgaatgactgcaaatatagctatatagcctggcccaatgcctgatggataatagttgcacaataaattctattagctctctgtacagagcgtcagccctgagccaggccatgcttttgggaaaattatcatcgttctcaaagtaagaaatgctgtaaatcttttgaaaagttatggtaagctggggcaataagcaccaagcatgtggcactccatttctatctttcctgactcgtggcaggcattgctagctgatcatgggcctttgaacctgactttagctgtagaatcttttcagtaaaagctgtaactgtttgctacctccagggaaaagaggccagtgtggagaaatgctttcttattttgtttcaaggtaaggttgcatagttttcaggtgtcattcaattcctctgaacctgtgttaacccatggctgaagcagactgtcatctcgcagaaccttcccacacagctggtgaagggaccagctccccatcattcctcaatctaagggcctttcactaggaatgaggaagtgattggaagatgtgagcgccccgtcattcaccaaaaaaccaaaggcccacctctgcctgtaggagagttccaccaaggcatattcaagacagagaggatctgggctgagtgtggggtttttgtttgtttggtttggttatttgtttgtttgtttgttttttaacagagtctggctggtggaccatgctggcctcacactcactcttgtcatcttgcctctacctccaggtaggacctggtctcagaagggcttttcttgagccagtgagatggcccaacaggtgaaaacctgaggagctggagttcagtccccagaactccatggtagaatgccagccagggctatgaagtgcaaccctcacccccattacattaaaataaataaaaaagtgaatgcagtaacattttcaaaaaggttttcttcttacagataaggaagaggaaaagagaagagaaagcagtgagagagaaggagaagacagcctggaggcagaggcaccaggtaaggctacactccagttaggcctcttgctcaacatggagtttgcagtgggtgactgggcttctgtaggccccacagtttcattcactcacctaaaggacagtcagtacccacccgtcagggttgttggaattataaaatgagttcatggttatgagaaggaccagtgcgaactgggtacgcagggaggatgtagcaaactcaggaacatgacctacacccccacccccgccccggaagcccagcctccacagtaggaacggaatttctcatctatctatctatctatctatctatctatctatctatctatctttccagcttctactgaacatcctcactttgtgctgagcaggagagggtgtgtgttgatactgaacacgtctttgaccttaggactgttagacccccggaaaactcaggcctccagggtctcagcccaggactatggtcaccccaatcaccaggcagatttgaaagcttgatgaaacagcatgaggctttattgttgtttaaggagctaaccccatgttagctcgggtctttcacccacccaccatggcagatggctagcaaagacagctcaaagcagctgcatagagatcttgtagggcagcgtaaggggagtgtctaggggtatgcacaggctcaggattggtgtgcctccaggcttggagggcttgccctatgttgattggccaactggttgttatggcccatgggccctcccagggaggttgctatgctctctacgtcattgctgtgcacttgtccataaagcacacccagagccgtaaagcacagcaccaccagctaacttctgattggttccttgccacgaggcaggcatctgactttttagtgactaggacaaggtcatggcaagcacgctgctactgtcatggctgccgaaatggggagctgatcccttcaggaccatcaggagggcaacatggccattttgcacaatgtgaatggagccccttcacagcatccctgcccctccccacagttttaccccattcagttttcaaggatacctttcctgatacaactcggacacatgccccagaagagcctccctggcatacagtgggtgtgggcactgagagaagtttccggcactgtgtagtctccactgaggctggggagggatgagaggagccccagcatttgtaggaagtagcccggaagccaatggttctagaatatccctactagttcttctccgcaaatcctgagagcccttgttagtgccagctccacataatcccaccctacagtgaaccccgagggtgctcaccctgtcccagattggagcctgaaatgtaatcacccttatgcattggcttcgtccctcaccatccctgcttgccccaaactgggctcccagcactggctcagaacccttcattccacaatcttctgcctctaggacatttctcactgaccttagctcacttaccagagacctacaaaactgcatttactttcggaacaatggcccagtattgagcaattcagtgcctgcaacgactttgtaacttctttgaggagtgagaattaactgcatttaattccccatcaggctcctagcaggtgcacaaatcccaggatttatatggaggcagcccaacacacaactgaaaacttactccaaatatggtgaggtgttttttactttacaatttttaaaaaaacatttatttagaaagggaaggcatgtaagtgacctggtacacaagggagggcaacttgtacaagtcagttctctccttcctactagtggggtctggagatagaactaaggttatcagactgggtatttctttatccacgaagccatcgatctagccagcccctatgggactttaaaaaaaaaaaaaagccaaatttcacagttctttagtgtcaactacaaagatgacaacattatgtcacaatgtcaaatctgcctcatatgtctcatatgtcccatctgccatttggtggagtgctctaatgagagatgctctcctccatgaccaccccttgctgcccatggtggatgggaccgctggtcctgaggtcatgagggtgggagagctggccttgctccttcctcaccagtgcagcactccagagaatgggctctgcagctcacctggacaatacagtagagctgaccttgtttgggggtacaggtgagcctgcctatagggttgaccccccacagtggcatgggtaagggaaagatgcccccaaccatgcccctttccacctgcagcaggctggagagctggtctaggtggcacaagagtgggaaagctggccctatactgttggggcccaaatatcgagtatggtatttcttttttttggggggggggtcgagatagagtttcactgtggctttggaggctgttctggaactagctcttgtagaccaggctggtcttgaactcacagagatcttcctgcctctgcctcccgagtgctgggactaaaagtgtgggcaaccaccgcccagctcaatatgatatttcggatgcaagcctcagcttgattccaggagctcaatctcccattgtctttcagaagccagctgattacctccagatgcctggccttggtggggaatagttcccagtttgtgtaacaatagacccaggcccctggttggatgcacacctgtcccgcacgatagtctcgccggcaagaaccacacaggacattcggatccttctgcagtaaagctttaatgcgtcttgagaggagagcataagcttaccagagcggagaccccgagccaagaatcccatcccctaataaaggctggcagccgccgcctgggacgtgtcaccctatgattggctgcagctcatcaggccatatgacgccacagaataggcagagatcaaggaatggaaaattacccagcgcctgcgcaataatcttgtttacattcagtgcctgccagatgcaggcgccatcattgtaatggagaatgcagggacggctccctacacacacccattgtgggggctaggggaacatgcctggaaactagtaagggactagcaagacgaagtgcccttgtagaaagtctggaggcttatgtacatgcattctgggactatctctaggattaatggaaatatttgatatcagttctattcagatgtcttctaccattacccctacttttggaaggatgcttgatactttttaagaggatattcgaataaaccttggactccagcatggactgagaaccctcctgaaatgacaatatgtctctgtctcctccttaacaccgctgggtagctaggagtttccaaaactgcaggatctccatgacacaaggcaacaacagggtatccaagaggagtcccagtgagggcccaggatggagggtggagtcgaagccagagatccatggcaatgaacacttacaagtaaagatgtgtggactaaagggtaaactgtatgactcactgggccacactacagcttccacaaagagactattttcctttcttcctcccttccttccttcctttcttccttccttccttccttccttccttccttccttccttccttccttcctttctggtctgttagtcagttgtttcgggttttttttttttattatttaatttgttttgagggaaggctgcaagggcagggggtagatatgaagggatgggaagaagaatgaaattgagatgcatgatgtgaaacccacaaagaatcaataaaaaaaaatagttgggcacacctgagctgacataagcttgcccagcctatcctcccaaaagacgctctgattggcacaccttcttggagctataactattgtccttgtttgtctgtctgtccatctgccatttatcaaatgctgctgtgcaatcctgagcaggcctcgtatgtgctaggcagtgcttttgtctatagccacgctctgtccgggtccctgtaggcagagggtccctgctcatgcttcaccatcatccctgcccacaccttcgtaaatagtgcctttcgactctttttaagggcaccatcaatttccagccagtgaagggaccagctccccatttcggcagccataacagttgaacacgtacttacctgatcttgtcttggtcactaggaggtcagatacctgccccttttggaagccatgacagtaacacaggcttgccctgaccttgccttggtcactaggaggtcagatgcctgcctcatggcaaggaaccaatcagaagttagctagtggtgctatgctttatggctctgggtgtgctttacggacaagtgcacagcaatgacttgcagagcatagcaaccaccctgggagggcctatgagccataacaaccaattggccaatcaacacagggcaagccctccaagcctggaggcacaccaatcctgagcctgtgcatacccctagacactccccttatgctgccttataagatctctatgcaaacgctttgcaaggtctttcccagccacccgccatggtggatggatgaaaggcccgagctaacatggggttagctcgtcaaacaactacaataaagcctcgtgcagtttgcatcaagctttcgactccgcatggtgattggggtggccgaggtcctgggctgagatcctgggggcctgagtctccgggggtctttccccagaataccagctaatgctgaccgtgtatggaaaagatgggccattttctttctagtgtgtacttaacagacataagcataggctgtcttttcccacccgtctccagtgacacattacacacagaagctgtttgctcctcctcccacaacagagtcaccccttggggggctcattaggagtgcacattgctgggcatccaacatctgctgtccctctggggacaaggctctgggatcgatctgttgaagtaaaccttccaggtgattcttaggtatactcaaatttgaagacaacttcctggagaacggggtatgcagcagaaaaaggggaggcactcagcaggtgctcatgacctttgccagggcccccttaacacctactgcctggcctttgtttccctaggctgagtcacagggatgcaggtgaggtttgcactgtgcctaagtgtggctgcttcctagctagggagcacagtacctgtcaggacaagtatgacttctgtaggaacttggcagtgaattgtgggacctctctgagttcaggcacagggcaagaataacatgaagcataccacccagggacatgccactttgacacactgatgattttgagatgggagcacttaagaaaaaacactgagaacactctccaccgtcttcccttcccctaaagcaggatataaatgtccctccatctatgcccagataatcgcccaagccccagagatgaagggctggtcttcagataaatttgtataaacaacctaaaacaattctctccccacgtatttcttgccacagacctacaatataccacctccagagaccccaacacccttttccttttgtagtttcttctccacaattgtccgccttttgttgaaaatgtttgtaccacctttcacttttcggggaagccccacatggataaaagcattaacactcataaagtagatatctgcctttcctcctgtaatataactttttgtcagtctaattctgagttctcagccactaaaccaatgggatggggaaaagagtttccctatagtctgaaagagggaagaatttctgtttgaattacaaaactccacctcagggtagtgaacataatccctctgtggctcttccaaagtctttcttggctttcatgtttcaaaacgcagatttgagatagcttaacaaggcaaacataatacaaggttaagaaaataaacaggggctgttgggatgactaagcaggtaaaggtgcttgccccagcaagcctgggttctatccctggagcccatgaggaggaggagagaactaacttgcagacctgttgtctgacctccacacacctagtggctgcacccctacatttcgagcactaaaaataaaactatgagaaacaaatccctaaaatttgcaagctacttatttaaacacttttctttgattagcttctttctcattccagttttggagcgtacgaaaccctgttgctaaccatgctagaaacacatctaaagggaaggcttaagaacttagtgtcctttaatcccagcactctccaggcaggggtaggtgggtctctgtgagttggaggccagcctggtctacaaagcaagttccaggacagccagggctattacatagagaaacactgtctctaaaaagaaaaaacaaacaaacaaaccaaaccaaaccaaaccaaccaacaaacaaacaaaaaaaccttaatgtctactaggttagtttagaagtctgaagagagagagagagagagagagagagagagagagagagagagagagagagaatgagagagatttggatcctctggagctgaagatacaagcagctcagagtgttctgacatggatgctgggaaccaaactcaggtcttctaggaaaacaggaagctctcttaaccactaagacatctctcctttataatgttctttgtatttaaaattagtatatttgccacagaaatgtagttaatgtgagacttcttatagctgggcttagacaaaggtaacagccaaaaacacctatgtgacttcaaatttagtttttactttgaaattggagttttttcatttataagattataaaaataaatgtttctggggctagggttggagtctagttggaagggtcatttcccaccacgagggaagccttatatttggtcttcactacacataaaatcctatgttgtggtgcctacttataatccaagcaaaaattctcagaatgaatagagacaataaacataagggctgggggtatacctcagtggtagtacacttgcctagtacttgtgaggccttgggttcatcagtttctagtaacacacacacacacacacacacacacacacacacacacacacacacctacctaccttttcctcacatagatccacaccaaatttactttaaagaaacaaaaggttgagtggtggtggtgtaaacctttaatcccagtagttgggaagcagaggcatgctgatctctgagttctaagccagcctggtttacagagtgagttccaggacagccaaaactacacagagaaagaaaaggaaaataaaagaaagaaaaaaggagaagaagaagaagaagaagaagaagaagaagaagaagaagaagaagaagaagaagaaaagaagtgagatgaagttacaatatttgatctaaacttaatcacaaagcaatattaacaagttgcctaaagtcactcattaacaaattaggggaggtttttatttcccagttagtcagcaactctgccctgttgttaaagacgtctcacttttttttttttttttaaattgggatgggactggcctcctgcatgctagtaactgactctgtcaactgccaggccttgttcatggaaggggcttctttcaaacaggtgtgagatgactagctgagatctggagccttcctcttttatagattgtttataggcatgtgctttctctcagtcttccctctcatccttgtcctcatcttcttctaacttttgcttgtttgagacggggtctcctgtccaatctgcccttgaactcactatcctccagcaatggcccccctagtgctgggattgctgtggtttctttttcattctctgactcaggagagagaaaatgtatggatatgtctttggataatgtaatttggtaattcatagcaggccagaatagactgataagtatttggctgggaaaaaaaaaaaaaaaaaaagcaggctcatagaaacgaggaagaatggaagggaaggatgagtctgtggtaagaccatcagcacacagaccatcaagtgctatgtaattgctaatgtcaaactcagacttggccttgagcttcggagcagaaggaacaaggaagggaacaaaccgattataagattcattctgtgtacaaattagaaacaccccagagattttgctagacatcagcacaacagatagacgtctgatacagggaccttcaagagacaggttggccaaggtctccccactctggctttggtaattcctcctcatcaatgtgtggatggacttgatgttctgtagctctgcaattttcagggccccaaaccctaactccctcccagagtccaccgcaagagtaaagtgttgagggcaccctgcctcagagttgtaggactgtcttctacagtgctgttcacgagggcatgcatttcccattatgatggcactttagattatttgagaaacattacaaaattatgattacctaggcgccactcagatgaacagaatgtaagccattgggactgggctccatttagttttaggtatggtgggaacagaaaagtgctgacatctgggtccctgggaggattacacttgaccttgggttagtcacttggtcagaccgaactcttccttgcaactccggctcagagattctgttttacaagtgagagctcagggtcattttgtgaagtggatttccagtcacagtgatccactgagtttacagagggaaggtctgggctccaatctaccctggcctctgacagcctgtggcaccattccatgctcttacttgagcactgaacactgtggttagctttcatcattggtgaaatggttagagaaatgatcaggatgtcacatggattttcaattgagtcacaaatagaaaagagctccaccataagccattcatttttgcatttccagtacatccatcggtgtgacacatagtaggcactcaagtagactgaaaatgactcatatttgggaaagcagactaaaaatgattaagtacattggttgctgttaagcatgaagttttactaaggtggaggggcagaactgaaacccacgccccctcactgataccctgaaattcagagttcattgttttcccattggcttggtgagcaccaggaatcatgtgatcttagggcttgggagaagagtgttctttgacctgtttttcactatggtatgtcagaatgtgggtggtttatacatgatttggctaggagataattaaactaatactatcataagaacttctgtacaaacccaagatgtcaaaggtcagcagactgaccgaatttttataacacggttctcaagtaaacctgttgtaacaccatgggattaattttctaataatgatgctttaatttattctttgaaagtttcatatatgattacaatgtatttcaatcgtactcacccccattctcccttccaactcctcccagattccccccacagacgcccctccttacttcacatcttactctgatttttaaaaaatgttatagctcactaagtgcagctagtactgcccacgtgtgcaggggtgtggggccatctatttaaggatgggcaacctaccagggatacatctttacagaaaaccaactctccctctcccagcagccatctactgccaatagctcctcaactaggggtgggaccttctatgcctcacctccatccaaaagcatgggttttagtaaccaagaacagcagtttattgaaacctggatatcacttggtaatagttttgtttgtttgtttgttttggtggggtttttttgttgttgctgttttaagacaaggcctgatatagctcaggctgacctcaaactcatggctgaggatgaccttgaccttgtcatcctcctgcttctacctcccaagtgctggaatcacaggcatgcaccaccactagctgcaagtatcaccttcaaatagtaaccaatccatgaccttgtttatgggaaatgtctgtgtttagtgcacacaaaaccatattgagataggggaagtgcaagggctgggctgtggcttgactttgttgctggccgggaacttagtgtgttccttggccaaatcagttcctctcccccggccctgcttttggtctatacaatgaggccagatggttatttccaatgtccgttcactctctcacaggcttggagtgtctgattgcaaactacctggtagaacacagctaccaacaacttccaaatactaacagacacctggtgggtgggtagaggcagaaagggatcatttacctcagtggttaagagttcaactctaaacataaaaaacaaaacaacttacagtctccatatctatatggaaatcggaaacatgaacagcaacaaataaatgaaaccctgacaaaaaccgtcgactatttctcctattccgtttatcacagtgtgtgggtttcctgcaatgactctgaaatgaccacaaacttgatggcttaagatacaaatgtgtatgtgtcgcaagacaatgactggcagagctcaggtcactctggagttccagaggagaggacagagtctatgtctttctttgcagctccaggaggctggccgtgtgtcccatggccccaagtcacctagcctctgcttttgtccctctcttggcaggaaatggacccctcccttataatcagcaggtgtaaaacttaaaggctggcgatgcacagctaattactggtctgaggacttgagtcatctttggccacaagaggacacatgcaatcttgaactcatacccagaaaaactcccctaagcctgacaactagccaacagtagcactaagaacctaagccttttataagagtattatagagccgaaggctttctgataaataacagagataccccattgccctcttgtgtaagaatctaaccaagcaggcctggcaatgattcacacagaggacagagacccttggaaaaagctgcttgctccagagcctttagaaacagtgtctaggctggcctagactgtgctgcccatggccccttaaacagctgtccactcttacccttgagaatgctcacttccttctgtagtcacttccacctctcttccacactatgctctgtgtgtctcatctgcattattttggcagagaggacaaggcccaggagccaaagttacttcagagagagacctgcgagaaggggtgggacagatcctggtggcatctgctttttttttttcttggtttcaattagatttgtcttcattgtagcaaagcatggctttctgttccctgaattgagagcatgcaattccctgctcctttgtgcatggcctgttgggtgtcccttgctttcctattttagatactatatgcctcaggtcccttgctcttgctatctatgataacctgtccttttctaaagtgggcatgagtgaccaatgctcatgtagtatttcctgggtgtctggattgccatgtggtaaggtccatgcattggattaaacttgtcaatattggattaaagatgtatttagcagacctccaatggtgggttcttttgtttttgaggcactcattgggtataaggcagcactggatcctgaggagaacttaaagattccccaatggtcactggcctccaatacctcatgaccgggatacgttgtttgttttgttttgtttttttctttttgggtttcctgtgcatctcttcagaacctataggaaggaagtcattacatacctaagaaaagcaatgtacctttactgtggaccagcaaaacaaaaataagatgagtgcctgtgtgaaacttggtttctgcccagccaaggaaattctggagttagacaagtcacgttacaattgatttccaggctcctgagtgaagggtcggagatggcccggtcactcactggtgttttgatgaggcacaagtggaagggcgtgttctccttgagcaccttgtattctttctctacaagatgagtaactccccctcaatcctatatcttcatctctataatacatccatcataattttgatcttaaaaactgaaagttaactttgacctgagagttcgagttttgtttgcctcttctgtaaatggttgggcaaatgttctagggtaaaagatcctgatgtgtgcaataaaggaaacttggcaatttgagttagatgttagagccatatgaccaataatgggtcatttaagctttaatggcatcttcttgctagatctgtcttgtaaaagacagaaagtagtcaggtgtggtatttgggggggggggtgtttgtttttgtttttgttttatgacattaatagaaaaatccaaatgacaccagggagtttttataaaggaaagtaagcaagaaaggaactagcaaatgtgagaaagagagcctgaaatgtagaaacacatttctagttaaacaaaaaatgcttttggtttaaaaaaaaaagaaaatgcagtttgttctacaagaaaaatattgttccaaaatggaaacagagacgaggacactagagggctgttgcaagaagacataagatgacatgatgaagatagctataactaaaggttactaaacattcctgaggtcatggactgggggtacagctcaaaggaatgcgtttgccacacaagcttgaagacctgagttcagatccccagacctcatgtaataaccagacactgtagtgcacacctgaaatcccactatacctacagccagatgggaggtagacacgcagaatccctgacaatcacactgtccagcttggtgagctttagttaaaataaaatcaatctagggccagtgcccagtcactggtatcccagtgttactttggatagctcagcttttacaaaatcctgcttctcaggatgtgtcaggtcttcagaagatagtgatagttcattgttttccttaaggttttgtgaatagctttagttctaagaaaactaaggtaaaacaggttggtgtggttctgtggaacagttctttctcatttaacacctgcaaagccctgggctgggtcccagcacctcatgtacacaaacaaaggaaaaaaaaaaaaaaaacccaaaaccataacagtgcttcttagatgtaagagctgagtccaccttccagagaaccttctgcttatcccttggcttatgggcttcttggtaactgagagtttgcttgatgggtacctactgagcgggggggggggggggggaccgcagaggggaatatagtgactttggggggaagcactgcaggtgggccctgcttcaaggggatgtgcccttgtagaggatctctgcccttgtctgtttggagttccctgcataaccagcctccagcaccatgccaaacaggaataaccagtattctgcccaagagtaggtgaaatgtgagacctcccaaaatagaagagtttccatcaacacaaacaagtccgtcctctttccagagagggaacaacatcctatcaaacaagctaagtgattgatacgaaagcaagggatggcaaagccccagggacctgggctggttactttgaaggctaacagagccttcaataaatagagctctccctccacacccatgggagtaagggctcacccaatccctggggaatgcaagtccatgaggttcttactcacctgggggtggattttgcaatgttacacaggagaatcaatacactatgactacaggttacatttgaaagcgccttgggagcttcatactcatttcagttaatcctcaggtggatcctgcacggttgacaagatttaagtccagatccctgctactgaggagtcctggtttgccgggagactgtctacctatccttaatggtgacatagataaagactgctgttatctgctttctggtccctgtctcacctttcaactgttctactctacagtgttgtttcacacaagtatggcaaagtagaagcataaatgtcaccaggcaggcaaaggaggatgggattgagagttgaggccagacttggctattttgtgagtttcaggacagtctgggctatgttatacaatcccatgttaaaacaaacaaacaatcaaacaaaaagatcatcttcctgcatctctcttacctaccttcaaccctcacaagagtactatgtctaccaggaccaagaagcatggcttggctacatttgccagttcaggccagcttcacagtacaccatggctccttctgtttttcctgcacaaacgctgtgacaacctgagcaacagaattctacccattccctccctccttctggaatgtctcccttggtaccagtggacctatggcttcagaggaactctttaggcccagtgagttgagatggcttggtgggtaatggctcttgctgccaagtttgacaatctgaatttgattcaactcccacaagttgttcctctgacttccatacctgtgctggctcacacacaaccacatccctcatgcacacacaagaagtaagcacatcttttaaaaacaaatttcctttttaaagaggtcagaacagatcccattgcttgctctaaaggagcaaagagagcccggctgagtcccccccccccctccatgaagagggtctgtggcagaaatagaccctacttgggaactgaggacactgtcttagctatgagagcaaagagctgagggaagtcaagagatgtccacggtcctgatgaggtcagccaaccacttgatcagtcaagggttagctgtgtgagagagaagacagaaacgaccaaaataagatattatctcattttcttgtttgctgctatctccctcctttcccctcaagcttaaaaaaaaaatctttttgaagagcacaaatacattgttgaattctctcagggccagttataggtcagggacatgaaaagtataaaaataaacaatgatttttaaagatagttttaagatcacaaaaaactaaagaatcccaaccattgcttgatgagaacagaaatgccaagtttcaggttacaggtcaagtctaaatgtcaaaggccttgcactgcctcaagggagggacaagatcggggaggacatcccttgttcctgctggcaggaagcccatctaagacaccagcagggccaggacatgtctctgtctctggagaaaatcagaaggctggttggtacgcccacactagccctaacttatggtaggtcagcggggaagaatgtggtattgttgatggctgtctctatagcagatgctatctctagaatagctgggctgacactggaaatatatttatgcatatgttatggtttcctgaaaggaaggtaaagttgaaaaacacacctgtgagtgaacaaggggttgggggtggggggctactggttgtatgtctgctttccaggctgactctgaaacctctcaccgggtctctcaaggtggacagtgcagatttctcagaaagactaaattgggtctcctgtgctgggaagctggtatctgaatctaagctgaagactgcaggaagggagcttgggacttagcctgtcagtgttttctaagatggggtgtctgacttcatagcgtttctccttaacttgggaacagatctgttgctttggttgtttgcctctcagtgatggttcacagtttacccttctgattaaagcctgtggctgcaggattagcccctggtagagggttccttagcttccacagctgcctgttaggtctctggaagtgtgtatgttcagaaaagacagtcttggcctatctcaaactgaactataggaggatttcttgcagttggataaatgccagcggttctcaggaatttgtgaaataggtccctatctgccaaaaggagtcaatttatttcttttacctgaggcagaagggacagatggctctccattgacaaatacctgtggttgcctatttaagcccaccctggcctccagatttcctcaaattgtattcacatgcacttgttatacatttcaaagccccccacccccactctagcctcctggctctccttgctgtcctccactccacactctcacagttccctctcctgcagctctgctgttctctctcctgcagctctgctgttctctctcctgctactctctgctagtctcccacctctctctgttcccaagggatagttctggccatgcccattctgtctctctgctctggcctcttccagatgcttctggatgtttctctctctctctctctctctctctctctctctctctctctctctgtttctctctccccctccctccccacccctcatccacaataaaaatattgtccctaatcatggaatagccatcttggtggtttctttactgccccatcgcttacatccactttattctaggcctttgcactttagtcttcccttccttcctccccagaagcacaagagaagaataaatacatctacttatcccaggcctggcctaatgtctagaggtgtgtgtgtgtgtgtgtgtgtgtgtgtgtgtgtgtgtgtgtgtgtgttagtgctataactcacaaagggccccagtgtgttccctgtatgtataaccagatcatttcagagcatttgttgctactagaaacccaagctctgcacacaaatgtcaggctcatcccactcattcacgcttagtgtaaaataaacaagagtaatcctagagaccagagggaaggaagcctttggcaagattacacaggaacctacacaggaattatgagggagaatggctatctgttcaatactagaactgctcactttctcccaaatcttgagataacattcctgtctataacctgattctcatgcagagaaatattttatctttagtgaatataaccttcagggcttaaaggcgagggctgcaaactggcagcccgtgggcgggatccagtttgtaacccggtgtgtttggcacatacggtgatctgtctataaatgagttgccaacattaatagagcaaaagtttcacatgcatatcttgagtgcagccatttattgggaaaactgaagattcagatcctgtaagtccacattccacagaacaataacagctattgctgatttaggtgggtctcagagttgcagttcaccgagctaatccttgtctctctggccctcaccccccccaccccactgccatccagaaacttgaagctgccttgtttagttctcttacctcaaaaatccaaatcaggaaatggtttatacatgcttgtaagagagggtgcagtaaagaaagcaccaagctccatgattaggggaaaggttttattgtggaagagagagagagagagagagagagagagagagagagagagagagagaatgaatctagaggcatctggaagagtccagagcagagtgaaagcgaagcagaccagacgtggccagagctaaggaagggggagcatgggaaaatcctgcagttacagtgaggaagatgagtagctgaggagaaggatgaccatgaactggaacatcctgggagtttagagtagggggtgtgagaagggccaggaggctagcatgggctttgggatactaaaaagtaaaaggtgaataggggctgaaggagtctggaggccagcatggactctgataggtgccccaggtatgcccaaggagagacacatgtcctttctgcctcgggttcctgaggatgccggcttttatctaaccaccagaatccttctatagtccagcttgagctgaacctagactcagttttgtatctagtcaattggcctataccctttttgtgggggaagtaggtaccctttggaactgataatcctctgctctacttcctaaataaaccacaaattctttgctggtagacttgcactttggaatggtaatgaaaatagaagtctatctgtcacttgggcttttgcttctgaatctctgaacttggggtcccagcctcacaggagtccctcaacaatgaatttgacacctagctaagttattactgggatttgggaagacaatggttctaaaaactgtaagctgtgcttgagtgtgttccagtttgcttataatcccagcatgctagaggtgtctgaggcaggatgatgttcaaggccaacccgggctacacagagagatcctgtctccaaatgaaacacaaacaacaacgctttagcttatgaagtcatttcctttggtttttccaaagaatcagttggggctgcaaaggtgacttagtggttattagtaccgttgcttttcccaagatgcacatggcagctgtttgtaattctagttctaagggatccagtgctgttgtctggcatcctcaggcaggaggcacacacatggtgcacagatatacatacagtcaagacacccaaatgcataccgtgaaataatagagtcaacatctctgcagaagatctgtttattttccttaagaagcagaaaagtcatctgactttagtgtagttcttggagctgttggagagtaagagttggctagtgaagcccagggcactcgtagcctcagtgtacatcagaagtagcacacggacaatagctttacggacaggcgtttgcctctggaactgagacatcttttaaaattctattcatcatagtcatttgtgaatcatatgtatggaatacgttttgcttgtttggaggacctactggcgtgaggcctggccttgaactcactggaaagctaagggtgaatttcttaccctcctgcctcttcctcctgagtgctgggattataagtgagcacctgtgtcaggtttacacagttctggggcccaagttctgggctttctacatcctaggcaaatatactactactgatctatatttccatatctaaatttatctaatttttttcacatttgatgaagtaaggagaggggtgtgtatcacagcacacaaaaagcagccagaagccattggaagttggttctctcctaccgtgagggtaccagggatcaaaatcaggccagcatgctggcggcaggtacctttactccctgagacatcacattaagaccaagatttgccatgtttctttttttggagatgaaatctatatcacataaaattaaccatattaaatgtgacccatttggaacatttccatattcttcaaggctgatacagctgtctggttccaagatattttctccacttctgaataattgttcataaatgtttttttttttttttaagattttatttatttattatgtatacggtcttgtgcctgcatgccagcagagggcaccagatctcattcaaggtggttgtgagccaccatgtggttgctgggaattgaactcaggacctttggaagaacagccagtgctcttaactctgagccatctctccagcccccaattgttcataaatgttaagcagtcaatcctgccctccccacctgcctctgtacccaaactgtgttgtgcctcttctcactgtggatacgtcattgtgaatgaagagggtgggctttggttgctcttactagcatcacgttttcaaggctcatcaccacagtagcatgaagtaccaatatttcagtctttcttgtgtccgaaatatattgtgagtacatgttgttgatgtttgttcctttgtttttcaggagagggtttccctgtatgaccctggctgtcctgtagacagcctagcctctatagtctaggctagttttgaattcagagatctacctgcctgtgcctcctgagtgtggtattaagtgtgtgtgccaccacacgtggctgtgaaaaagtatttttaattgacgaaactgagaatttattctggagttttgcttatcagttcccaatgtagcgaagggaactgagccgagtttttatctttataaggcttatcatcaagaaggcagtaatgaagacgtgagtgcctgtagggatatgaaaatgtctgcagggttaaacaaggctgttagaagcatttaatgagtcaagctacacatgcagcttttcttgtcacaagttccctttcaacaaacgcaggccatgttgccataaaaaggcaaaggcaacctccggtttaaaaataacttttatgtgtatggatgttttgctttcgtgtatgtttgtgtatattcatgcctggtgctggaggccagaacaggatgtccaattctttggagctggggttacaggcagttgtgagctgcccaatgtgggtgctaagaacagaacttggatcctctggaagagcaacaagtgctcttaaaccctgggccctctctccagactccactttctgtttcttctcatccacctaggcggctgcagagagattctcttttcatttccataacgtcacatagatgagggtccaccccctcccccagaagagtagcaatagacataataaacttttactacgagtgtggtcaagggtcttagaaaatcctattagccttaattctcaggtggggaaaatggtagcacaggtagatgaggtaattaattctcagaagttctacagcttagtgtgatagcaagccatgaaagtagtttaagtgactctgttttgcacagcatgttggcaaggtgctccaagttctacaggcttggagggtgagcaggaaggaagtcagcatggtaggcctgacgtccatgaagtacaatgagggccatctggcctgggttccagcacagtcagtccccacacactgctggacatgtggcccagtcctggaagacccttggggacgccatgcctgaccattttggcctaagcaggtatcacagtctgaaggaatcatatcccaccccaccccacccctcactcccatagaatctgaagcactaagtgagtgagactcaggaagctaccaggtaagtctctggttactgcgtctgttgtctcacttggagagattggtcatactttcatgcaagatccactgtggtatccttcctctggggagcatctagggcatgcagcagctgcagaggctattttgggccagcaaggacccagagaaggtcaccactcacaggccaagtgagattatggggaaggctggcattttggacaagcctgggtagatgtgctaagctctggcaagcacacacttcatgaatatttaagtagacttgaacggcccattttcaacatggagcaaattcagttaagtcagtgttgccagcctccaaactgctgagtcacacactcttggtaccaagtcatctgctcccgtaagcccagtggaaaaatacaaataagcaccgaagtgtgaccctcaaataaatgcccaaagacatttagtttgctgggttcttttctaataggctacaaaggatggaagagaaaacctagaagccagaggcatttaaaagtaccaattctctcaggccaaaggcagaatctaaagaagtgaaaattccttcatactattttattggttcagtaattaattattaaaatttcaaactttttggtttaaaaaagtgcctggacctcaagacttatcttagctgtggagcacttacttggcatgtgggatcttgggtttgatccctaacactaccagagaaaacaagaaaaggacagaaaaaaaaggaagaaggctgggtgaagtgttgcccatctgtaattccagcttcagtagccagagggaggaagattgccgtgaagcctgggttacatgccaagaccctatcttacttaaacaacagtagaagaagaaagcaaagtggaagaagggaagaaaggaagaaagaaagaaagagaaagaaagaaagaaagaaagaaagaaagaaagagaggaaggaaggaaggaaggggaaggaaagacagaaggaaggaaggaagaatagaagtgcttgaagacttccagccaaagttagcttttttatatttttattgccttattggatcgaatccatgcattaattaattataaactgtcttcctgagaattaagatgacagttcttcacacacatgcctctgaacactgaactcgagacacaaaaggtggaaaatagagaaggaaaaatcaccaacaatacactgtctattgcaagtgtgtgtgtctgctagcacacatggctgttctgatgtctactctttctgtcttggtgcttgtgatgtgagcatcctgtcacaacatgaggctgactcagcaatgctgtgttaaatctatgtgttccaaacgctgaacatacagtgatttatttgacctttcttctctcttatatatgctaaaataacctttctattttaaatgttttgcagtactgggctcattcctgctttctctccctccctccctcccttcctctctctcttttttcctttgagacaggatttcactctgtagcccaggctggcctgaaactcgtaagaaggatcatggtaaccctcccatattgggattatagacataaaccacttgcacaattcatgtctttttaaaaagaacatttttgacagatctttatgtgtgaaaccactacatgaaactgtgagttcttttaaggctcctggtacaccttaaataattgatttacaggagagttattcaacatatatcctaccagcatcatatacgttctattaattaaacttgtaagaagtgcctgtcatttaaaaataatcttcacaatataagttacatatctacatctactcctttgatactaagaatgaacagtacatacatatttatttacatatttcttactgatctgcaaacgcacaacacatacaaataagacacatgatccttactttgggtttcatacttgtaaagtctgttccagtgttgggtcacttgatattaataataaaaactcagagacagatattggggttcaagctgaagatcagagaagcaaagaagccagcactacagagttttcacctctaccaatgctcagaccaaaggggtgatcctatcctcagactgcatctccagactgcatctgtctccaccaaaccttagactttgctgagctcttatattcctccctagtgctgggatcacctttgtgtgagctctgtttctctcttaggctagatcaccttcatgtagttcagagtggccttgaactaacaaagatctgtctgcctctgtctcctgagtgatggaattaaaggtgtgtgccaccactgctttgtagtggcatcttgccttgtcagtgtacttgtagcaatggccacaccctgacagctttaaggtagaagcagagggatggggcactctctcttgggttgcagagagcatcggaagggcagaatgaattatctcgagcaggaaggccgaggtggttatttactcttatctgtgtaagtttctccccaataaaaacacctatttatcttttatcttgggtatggtgaactcatttaaactccaccttcactgcctgacctgtatggctgactagtgtggctagctttgcactctgatcttcaggcaagctttatttgttagatcataaacaaaatatcactatgttttcccttttttgtctaaaataaaaaggttataattaatataagaaagactatatacaataaatacaataactatacataatatataggcaataaatatatcaacagtgcctggtccatttgcatttgacaaattcagagaaagtactacatatctatcctatcttggtgaatccagagtgttgtacctattttctatcctaacttgcattaacatccaaaactatcttttgatatctctctaccttatacactggtaaacaaggaaaactgtaactacaactatctagtcttcagtcacttgccatttattttctcttttcttccttattggcacgtatatatatgttcatttgtgtgtggccaggagtgtatacctttctttttcacacagtgtctcataatgcattaagagctcactgaaggctcagctagtgccagcaagccccactgagttcgctttctctgtctccccaccacaggggtcataggccactctgtgcctgccttttggtgggttctgtagggttaaatgcaggttttcagccatctccccagactctcttttattctctctctctctctttctctctctctctctctctctctctctgtgtgtgtgtgtgtgtgtgtgtatgtgtgtgtgtatgtgtgcattgtatgtatgcaagtttttaattttgtgaaatcaatatgttatgtaatgtttctgttgtctgacatttctgttttgattggaacctctgtccattttaagctgtaatgattgcattgcacttatattcatttatttatcacttgatctgtctcctttcttatttatctaaagtcatttccacataactctgcctcatttataaagttgctgggctggggctatgactcagttggtagaatgcctgcatataaggcatacagcctcaggtttgatccccagtgttacataaacaggcatgatggcacatgcacaatcattttgggatgtagagatagggggatcggagccaaggtcattgttagctagtttgagaccacctgggatacatgcaacaaagcagagactcaaatccactatacagtgacagtgaacacaccagacaaacttcagccacccctcagcagtggacagtcagactcttgtttgcatttgggattcctagcttggcttgttgctcagcctgttcccactcacacagttttcttgctttggcatctgtttttgtcttttgcaactgctcataaggacacggaagaaaagcttaattgtatgtcaagtaagatgaactgactcagccctagtgatcaacagcctatcagattgggccaggaaatctttcaagtccattttatccccatcatcaatttagtatgtgggaactagagtatgcattttaactcaccatagtcttctttccacacaaataaagctacaggtcaaagtagcctctggtactccaaaggccagattttatgaaagtcaaagctgtcgactgcaggctcgcccaatgtgttcagcaaagctgtataagggtgtatagtgtatacactgcataagctgtataagggtatataaagtatatactgtataagctgaatagggtatataaggtatacattgcataagctgtataagggtatatactgtataagctgtataagggtatataaggtatatactgtataagctgtataagggtatataaggtatatgtaatgataaatctttccgtcaagccaccccagccccaccaccacatgggcgcccgaaataacacacacaatcatatattaattaaaatgctgctggccaatgactaggatttttacatgctaacgcagtcttaattatcaaccataactactaatctttatattttataagaacttatcttattgaggatgcgggccatatgcaccctctcttgccagcaatcacatggcggctctacagagaggaggaagaagaggaagagagtgatttcctgcttgtccctgcttatattctgagtctgcctgctatgtcacttcctgcctgaatcacaagacttctctttactacatttcccagaatcctcctcgtctcctagtcctgcctgactagcttccctattggccaacagtattttattcatcaaccaataagacaaacatatacacagaaggtgtatactttataagctgtataagggtatacagggtgtatactgtataagttgtataagggtgtataagctgtataagggtatataaggtatacactgtataagctatataagggtgtataaggtacatgttgtataagttatataagggtgtataagcatatactgtataagatatataaggctttgtgtaaaggaccaggtatggggagcctaaatctgggttcagggtttattttttgcttagttatctcaaggttgagcctggggccttggcgtatgactggacaactgttctagaagtggtttttgtgctgctctgtctcaaacttctcccgagttcttgctgaagtgggggtggggtggggagtggggtgggatgggatggggtggtgaggtgaggtggggagatgtgtcgctccatatgctggcccctgactcctgttctcatctaacctcttccaatgccttcctagttcattttgttttagccatagcctttctcggtgttgctcgttttcctctgcctggaacattctgatggtgacattttctcaattgaggcttcctcttctaagtggactccatcttgtttcaagttgacataaaagtagccagcacaccaagctctatgccccccatcacaagatagcagaaccacccatatcttgatatattgaaatatattgatatatcttcatctattgtagcaggtatagttgttgactttgggaattctccttccaaagatgatagagggtctagactttggaaaaagtacataggaagaaaatctgattcttacagaaggtaaaacatcttttcattctccaattcaatgaatacatagtgggtgatgaccagagactaggcagaagctaagcactatgggtaaggtgatgaatgaatggcacagacattgattttggtttcatagagcttacggactagaaagaatcttacagaactaaacttccgtgcttccagaaactgctgtgttttccacccacttaagacatattgacagtatatgacatattgacagtatacacgtcactctgtgtcttaggagaagtgagtaacatgctgagtaaaactagacaagattcttgccttcatggagctggcagtctggtgagggaaacatgaaataatcccagcactaatggtgctgtaagagtggacttaaggaaaagtgggcgtaattgggtcttgtttgagcaagtaccacttcagttgagatttgaagggtattagcttggtaatgaagggaaggaaccagcactgtgggggatccaaatagtatatgtggagataaagtagagatggtgacctggaagtctgagagaggccagtgtggctgtgggagcaccctgtgtctgattgatggtttgagaggaaggcagggtgttgtgtatgatatctgacacagaagttcaaccaaaattctgcatggtgttttctcagtgggtctctaggctaatgccttagggtgcttaagccattacatgcttgggccacagaatcttgaatcaaagaggctcactgcactggcaagcagaaacaaggccagtcagttgctagcatggccactaaaaacaatgaccagcctcttgccacttagtggtgatactgaaggaagacaaacttttcatttattacttattcatttttaaggtatttcaacatttttattttattattgtgtgtcttagttagggttacgattgctatgatgaaacaccataaccaaatttggggaggaaaaggtttatttggcttatgcttcaatatcacagttcttcatcaaaggaactcaaacagggcaggaacctggaggcaagagctgatgctgaggccatgaaggggtgctgcttactggcttgctcctcatggctccctcggcctgctttcttatagaacccaggaccaccagcccagagatggctcctcccataaagggctatgccctcctctatcaatcactaattaagaaaatgctaattaagacatttttctcaattgtgggcctctccttttagataactctagtttgtgtgtcaaatggacataagactagacaacataatagtgtttatattgtgtgtgtgtgtgtgtgtgtgtgtgtgtgtgtgtgtgtgtgtgtgtgtttaggtcggtagatagctagtggaagttggttctctccttctaccacagcacccagtatggaattctagttgtcagtctttgggagaagatggggacaagcatacgtaccttctggtccatcttgatggcccaagaacatctttttcaggcctttgtttcccagtgtcctgtgtggcagtggaagagaacgctgtcttgggaacccattcatttttcatttgctacctttatgttcttcagctattaaataggaagaaaaatattttgttttcaaagtctgtacttagcacactgcgtaactcagcagctattcattaaatcatagctatgattttttttttaatctgttaaatggagacaacactagctgtcttctgtgactccctcctccctcctcttctttctccttctccctcccaccttctatagccttggctggcctggaactctttatgtagaccaggaagggctctaatttgtataaagtataaatcctccgtaactcttccttccttccttccttctttttttccttccttccttttttccttccttttttcctccctccctccctccctccctctctccctccctccctccctccctcctccctccctccctctctccctccctctctccctccctcttcgttatgtatccctctctggactcgaaatagggatcttccagtggccatcctccctagttccctagtgccaggattacagttctattggtccattgctggttgtgaagtcttacttcttgtttctttgtagaaagaatcctactttttcggaggcatctgcccagggcaggataaatgcctgatgcattctgttaaaagtggtcttgaactttcctcttgcttggtgctgctcgttttttaattcatgggtgtttttccgtttggcaatctgctggcaccaggctggggagcagaagcaagcacaactaccatgccccgcccaggccaccaccaaagatcactcagactcaagcgctcgggcacagcagagcggatcggccaatcagaagaagtttggccctctgcagtttccgtccgctcactaggaggcgctgcggcggccgcggcggcccgggctgtcgcgggccggggcggttggggctggtggctgcggctgcggctgcggccatggaatggagttccgagtcggcggccgtgaggcggcaccgcggcgccgcggagcgtcgggaggaccggcggccgcgccgcaccgggagagagaggcctcagcgcaggaggacgcgagcggcagcgggaggacgcggagggggagctcggagagcggaggcgcgagccggggcgcggggaccgcgctgtccgaggcgcgcacggtgctggcgctcgcactctacctgctcgcactgcgggcgctcgtgcagctctcgctgcagcggctggtgctgagccggacctccgggctccagggcgagttcgacgcgcgccaagccaggtacggtggaccggcccggccgcacgtccgctgctgctccgggcgggagagcccgggggtgggggagctccgtgtcggtgagcgccgcgcgggtgagccccggggtcagagaagcctcgggcgggtgagtctggcgccgcggtgccgagttccggggggggggggggtccttgggcgcacgtgggtgggaagtgggatggtcctgcgcgtccgtctggggtcggaattgcgggtatccggggcttgcaggctcccctttcgttttctcggggtggccaggtggaccgaatctgctgtaccatccactctgccccgcctgcagaaggtttgttgttagcacgcccctgtgagtgggatgtctgtgccaagattgcattcattataaagccctttggggatggtgtaggaaccacagcccccccaaatccgaaagctgtgaacactcctcagagggcacccattcagaattttgcctacaatttctcaggttctccattggcctgtggctcttctgtgatacgaattgtatagggctcaacctttttaaacgacctcagatgtacttgggaaggtgaactctttgatattgtaacttgcgtcttaaatcagatgaatcctaagctagcacaaagtttttttttttttttttttttttttttttaactgcggttgttttaaaagctgcttctttggatgtagcgtgtggaaaaccgattttcctaagggttttcctcattaccggtttcagcatttagaccagtaaggaacaggaacaatctataatgagcctgtgaagttggttttcctgcttagtcttcagcagtcatacatgctgaatataagccctagtcttggtactgatttgatgtggagtcaatggaggaaaatttgaaagcattggttcctccgatgtaatataaagtgataaaacttccaggtcattttcttgggacgtctgaattttttgttagtttatttatttatttttttaaagtgccttgagaggcagaggcaggtggatctctgtggtatcgaggctagcttggtcctatataaaaatgtgggaggaggcagtgtttttttttttttccctttatgtgagaaatcaaaagaactaaactttctgaggttgaagggaagcatagtggaaagttcctccaagatgtattctttctaagtttatcatcatcattccttttgattgcttccagggattatctggaacacataacagccattggccccaggactacaggaagtgcagaaaatgaaattctgacagtacaataccttttggagcagatcaaactgattgaaagacaaagcagcagccttcatagaatttcagtggacatacaaaggcctacaggctccttcagcattgacttcttgggaggttttacaagctactatgacaacattactaatgttgtggtaaagctggaaccccgaagtggagcccagcatgctgtcctggctaactgtcattttgactccgtggcaaattcaccaggtatgtacttgtatagtcatttctagtcactgcagcctagaaagtttattagcttagccccaaccgtgtttttcctagaccaccattttctcgttgtgatggaagtcaagctaattatcagtttagagtctaacaacgaatattcccttccgttcattattattactattgttataattattaaacagtggctcacaagccccgtgacaatacatgagacatttttggtagtctgaagtagccttattagttgaccatgtgtgtgtccacttgtaagtgcttatacagccaggggttgcagtaggctttgggtgtactgggtaaaggatccctgcatttcagggatacatggtttggaggacattacttctagaagtttccgtttacttaaaaagttagaattactgtccactgagggtactgtgacattctggtagaatacttagcctagtgctctgaatagatattggcaagatagaaaacttgatgtttaagacaatgactgacataatacatatttgtcaaatcagtataaatcccctaaattgaacttaagattttccaatcaaatggccctaagaagcaatcaggtgtagttatcctaatatctaacaaattagatttcaaactaaaattaatcaaaagagatgaagaacgtcatttcatattcatcacaagaaaaatccatcaagatgaagtctcaattctgaacatctatccaccaaatacaaaggcacccacagttgtaaagaaacactactaaaactcatatcacacattaaaccccacatacttatagtgggagacttcaacaccccactgtcatcaccactggacaggactatagacagaaacttaacaaagaaacaaaggaactaacagaagttatgacccatttgtgtttaatagacatctatagaacattccatccaaacacaaaagaatataccttctcagtgccacatggaaccttctctaaaattgaccacaaacctcaacagatacaaaaaaaaaaaaaaaaaaaaaaaaaaaaattgaataaccgcctgtatcttactggaccaccatggcttaaaattagaattcaacaacaacacaaattgcagaaaccccacaaactcatggaaattgaacaatgctcaactgcatcactcctgggtaaaggaaaaaataaagaaagaaatcaaagacttcctagaattcaatgaaaatgaagacacaacatacccaaacctatagaatactctgaaagcagttctaagaggaaaattcactaagtgcccacatgaagaaactggagaatagccacactagagaattaacagaacacctgaaagttctagaacaaaaagaagcaaactcaaccaggaggagtagacaccaggaaataatcaaattgagagctgaaatcaaagtagaaacaaagaaaacaatataaagaatcaatgaaacaaagagttggttctttgagaaaatcaacaagatagacaaacctttatccaacctaaccaaaagtcagagagagaacatgcaaattaacaaaatcagaaatgaaaaggggatttaacaacagacattgggggaaatccagagaatcatcaagtaatactttgaaaacctgtactccacaaaattggaaaatttaaaggaaatggacaattttctgtatagatatcacttaccaaaattaaatcaagaatagataagcaatttaaatggacctataacccttaatgaaatagaagtagtcatccaaccaaaagaagtccagggccagatggtttcagtgcagaattctaccagaaattcaaagaagagctagtactaatactcttcaaattgtttcacacaatacaagcagaaaggtcattgccaaactcttttatgaggctacaattaccttggtaccgaaactacacaaagatccaactaagatagagaactatagaccagtctccctcatgaacattgatgcaaaaatactcaataaaatactggcaaattgaatccaaaaacacatcagaaaaaatcatccaccatgatcaattaggcttcatcccagggatggttcaacttatgaaaatccatcattatgatccaccatataaacaatctgaaaaaggaaaaccgcatgatcatctcaatagatgctgaactttttttttttttaatttaactttttattgattctttgtggatttcacatcatgcattctgatcccatttatctccctgtcctgttacttccaacctctgcccttgcagcttcccccaaaacaaaatttgaaagtaaaaccaaaaataaaaactaaaaacaaacaaaacacaaaaacataaaaaaaaaaaaaaattcgcttcatggaaactagtgtggcccagtgagtcacacagtttaccctttagtccatacatctttacttgtaagtgttcattgcagtgagtcagtgggaacttgtttttttttttgttttttttttttaaatataagatttctcagccaggtggtggtggcggcggcggcggcacatgcctttaatcccagcattagaaaggcagaggcatgtggatctctgggcgctctaggctaacctggtctatcgagtgagttccaggaaaggctccaaagctacagagaaaccctgtctcaataaataaataaataaataaataaataaataaataaataaataaaaggtaattcagaaatatgtgttcaacagtttgaatggttttttcatgtgtcctgaggccagactctggattgctttctccttgcagtagcaccaaagagtgcatgatacattggcaagagcaatggtaaggaaacatttaaaactctcttcagctgtttcatagggtgttggctgaagtgaatgcagccaaaacttaaaccagaagaggcattatgcttccccagaaatttcaaggaaaagcattaaaatgaacggtagtagcttggaagtggagagatgcaattagcttgaaagttcttccaggatgtagatgtactgatgtagttgtggaccacaaggattctttcttgcttcttttttttttttttaatgtatctatgaaatggggtgtgtgtgtgtgtgtgtgtgtgtgtgtgtgtgtgtgtgtgtgtggtgtgtgtgtgtgtgtgtgtgtgtatacgtgcacttacttggagggccaggagagggtgtccgattccttggagctggagcttagatatctgtgagcagtagtggctgttgtgggtgcagccctctgaacttgccctcatgattaagcggcaagttttcttaactgctgagtttcgaggatttgctgttgggttattttttttttttttttttttttttttttgagaccgggtttctctgtgtggtcctggctgtcctgcaactcagagcttctcttgcctctgcctcttgagtgctggaattaaaggtgtgcaccactaccactgcccagctccaaggattaatttttatttatttagagatagtgatgtttttggaaaggattgatagagggaaacaaaaccactattgaaatgatattatatgaaacctcattgtacttaagtcctgaaatcttttatcatgtaagtaaatttccatgactctctcttacagtgacctcatgtctaaaccaatgacatgcataatctctaaaatttcttctgtatatactcatgtaaacattcacaaataagacatgcaaaaacaaaaacaaaaaacaaaaccaccaccaaaaaacccaggtaatataggcaggtaagaatagaaagtagtatttcataatggcatcctgagatcttagacttaagaagacccctcttctgacctctgatcacacggagctagggtaggttctgggcctcctggccaggaggagggtatctgagtatcattagaccttctcaggcttattgcctaacttattctttaacttcctaactgttaaatggaaaaataatagttaatttcctgatagtatagatcaaaggattaagtgtaaataaaacattaggagagattctttcaaggcaatcttccctttttgttggtactactgataacaatatttctggatgtttgaatgtacagcaggcccaatataaccatcagagttacatgtgacataaactagcctcattttgatgaaatgattttgcgactggacatttctttgcatttagaatatgctttgcttgttcagaaatcagtatctacacaatttttttaaaaggcagaagtgccttatcttatgctagggacactagacaaggccatcctgtgcttaaattggaaagggacacatgatgctctggtattttaagagcactgtattaggaagactggatatataggtatcaaacaaatgtaaaaacgctgatttttttctttacctttcataattcttatgtaaatacagaaaagcagacaaggctatttccacgtgcagctatatgtgggcgataccaagggaaaatgaaccatttcaaagtggtggttcagttctctggcttagatattgttgtcatcaaagaacaaaactttttggaaaagtgacaaggcaaagggaaagaaccaggtgggagagtgattgtccccagtccatcctcagtgctatgggaaaaccaaaaccaaaccagagcagaaaaggagaaagcccagagcctgtgggcagcaaatgctggaaatgatgtcatgtataggaagtaaagtctagttggctgagttggccgtctgtaggctctcagggctaaggttgtctttggaggttaacctttgtccttccggccagaggctaggtggaacacctgtacagatttatgttctgcttttaggcaaatgggaggagggtagggagctttttcccatttccttctggatttctgtcactaccaaataaccttgtgtttgtgttttctgctgctcttcacacagtcccaggtgtgtggctttcatgtggagtccactaatgaaaatattctttggacagccattagaatgctcccccttcttttatacagggtcttatgtagcccaggctagccttgaactggtttcatatttgctatgtagctgaggacgaccttgctgagtttgccactatgcttggtttaaatgactaaagagattttttttttttcccagattgaatctatggctttctgtatgctaagcaaagcttatttctatcttagaaatcatttttacctaaaattttataatacccatactaatagtgtgaaggaaatttcaaccaataataatctaggagtagtttttcacccactcagcaaatagttgtcgcctgaatcctttcagtggatgaagtcactgaagcaagagtgagtatttgtgtgtgcacacatgctggggatggaacccaacacccatactggccaggcagatgctctaccactgagctgtactccagctataggaatattattgagacaccctcagcagtgtactctaggctggcctgagccttactagcaattctgctttagccaccaaaggactgaggtctcaggcctggcagtcctgctcagctgtgttttttttcctgtgagcattatttttaagttctcagcagcgtatctgtacccaggaattgataccaattagaagtaatgtcacccacagaagggcctcttttatcgtctcagctctgctatgtgctgccaggtcatcggtgaaagagacatttgagttattttggggtggcttcaatttcagggttgattctaaaggggaagggatgtcagttaatcactcagcatttttactgttcgctttcttaaaggtattttgacccctttttgggtctcttctaagacactagaacagttaaagtaggggaatatgaatgggaagttaatttgtcagtcagccatataaaggtaaattttttaaatttcacttttaattagaataaagaaaagtgttactatttgctttttattttaaaagaatagtttcaaattaaagtgaaaatgttttgtgttttctgaaaagtggcacacattagctctataagcttatactccctgctctaattaatagtaaccaggtagccattattttgcttcactctgattaattactaaaatacagtctaatattcaccaagagaggtgtcattaattatgtttcttttagagcagaagtgggttttagaatttaacagagcaccaaagcaagcattttattttccctggttatggaggcttcgctaagttttcagagaagaaaactaaggtgggatgtttcccaggagccaggcaatgggtgttgtcttgtttaatctgtgcataacctgtgaggtggagccatcactccgctttctagaccaggaaatggtaaatgacatcctgctctccagtccccaccgaatgctgtagccctcggccgcactgcgtgcacacccggaagtgctactgcctgaattagggtagtgtttacttactccaaatgcccttcaaactccttatcatgagaaaaatcagatgtacaaaacaagaattgcttattgaactctggtgtgcctcccactttcattcagcccagtctctctctctctctctctctctctctctctctctctctctctctgtgtgtgtgtgtggtgtgtgtgtgtgtgtctgtgtctgtgtgtctgtgtgtctgtgtgtctctctgtgtgtgctctctctctctctctctctctctctctctctctctctccctctctctctctctgtgtgtgtgtctgtgtgtgtgtgtctgtgtgtctctctgtgcgtgtgtccccgccccagccctcgtacgtttattttgaggtggctctttgctgcattggttcctctctatttcagtctctactggtgaaggatggggacccctttgagcatgtcaacaatattatgagcttcctcacttagaaaatctagcaataactttttagtgtcatcacatagccagtcatttcctttaactatctctcacagagctttgaaagtcagcacatggagcccagcaaagatggctcagtgcttcaagatgcctgccaccaaacccagctgcctaagtttggacccacataatggaaggaaagagtgacctctaaagattgtcctccacttgcttatgtgctctgtggcaagtgtgccaacccctttcccgcctgcacacaaagtcagtacagatgttaaaataatgcatttcatttttttttttttaaatcagagcactggagttctttttatcatctttagtttaatatgattctctgatgtagaggctgcagtattggagattttcagtgctggggcagacccagcccttagtttgttcggctgtgtggtaccattcatgtgcctttgtgctcttccattactccatcccttcagaaaaactttaaaaagtgttactccgtccaatgtaaacatccatgcagagtgttcctccctctgtaaatgggaagtgctacagcttttatgattttgaaggccaaggaaatgatagagtggaggaagctgccaagtaccagaagtaaagaatattccagagcatggtgggagaggatgaattccagttggccttaggtcctgtctggttaattcattaacacagctattgagtgtgtagtgtacatggttccaggtaccaattatgtcattgagcagaccagacaaggatcttaatggggcttgtctttgttgggcatacttatcaccctacgatgacagttatgcttctggtcacgcacctgccgtggcacttctctgaggggaaaactgcattccacaccagcaatgggaagtgctgagactctgagaagtgactctgttttctcactccaaggtgccagtgatgacgcggttagctgtgcagtgatgctcgaagttctccgtggcatgtcagtgtcatcagaacccttgcagcatgctgtggtgtttctcttcaacggtgcggaggaaaatgtcttgcaagtaaggttattgttttaaacatttgagttgaataataaggagagcaataatgattggtaacatttaatgtgttttattagcaatatgaataatataaaataatgtgtaaaacaaatactgtacttagaagtacttttaaaatacccatgaatgcagacatgctcattatgttaaaaacacaactgagaacagctcatcttgctagtatgtaattcttttattttcactttttaaaacatttttttcaaggacagtgtttctttggtagcattggctgtcctagaactagctctgtagatcaggctgacctcagatgcacaaaggtccacctttttcggcctcctgagtgctgggattaaaggtgggtaccaccactgcctggctgttttcatttttagtttttgaaacagggacttgctgtgtctcccatgatggcctggcacttgtgatcctcttgcctcagctttctgagtgctgggattacaggcatgtgccaccatgcccagaaaagtgtttgattcaagggcttttttatgttataattactctcttctgagtttcagagagatgctcgaggaaggtacacagcatgaatgccatgtgggttatctctcctgtattttcttaacttttgcctatcctcacagtgactttccacttggctaatgggacaccattatatacaggaagatgcctttaaaatttttttattctgttctcatagtccccacctttttatgatagccattctgtcatgcaaataagcagtttaaaaacatattttaacctacttttgtttctcctctcattaaggccagtcatggttttattactcaacatccctgggccagtttgattcgtgcatttattaacctggaggcagcaggtgtaggagggaaagaacttgtgttccaaacaggtatgtgaggctgtacactgagcatttcagtgcagttctaatcttatgacagtgaaaagtttttcagtgtcactaatctcttaatgagcaatctattgaatgagatttatttttaagatatgaggtgattttaacttgtctttgtgaaaattttttggtgtgttcatgtgtggtatatgcatgtatgtatgggtgtgtgtgtgtgtgtgtgtgtgtgtgtttggggtccgcccacacgcatgcacgagctcatgtttgtggtagcccagaggtgttaatatcctgtgttttcctcagttgcattctactttatagatgaagaatagaggtgggtgagtttaattttgcaagattttatagttggtatggcatgatttgaacctgaatgattcaggctcagagttggttcctagctagtagctggattgtagtatgtattgttttttttgtttttgttttgcaacatgacacagagttaactggaatgacagatgctcaattgaggaactgcctccatcagactggcctgtgggcatgtctgggggcatgtctatggacattttcttgattaatgattgatatggaagggcccagctcactataggtggtaccactcctatacaggtaatcctgagtttatacgaagcaggctgagcaaaccatgaaaagtaagcgaataagcaaccattcttccatggcctctgctttagatttgcctccaggttcctgacttgagtttctaccttggcttctgttgggatggactctataatctgtaggctaaatgaatccatttctccctgcaaattccttttggtcagtgttttatcatagcagctgagaagcaaatgaggacatcatataaaatgtaataaaaatatgtaatgctttatgttattgcaaaaaatattttaaaaaaatcatatattttggggtggtggccattcctttaattccagcatttgggaggcagaggcaggaggaagatctctgagtttgaggctagcctggtttacagagtgagtttcaggactgccaggtctacacagagaaactctgtcttgaaaaaccattaaaaaaaatcactatcatataatggtgaatattatttttattaattatggatgattataagggatttaaaatgataatttatgagttaaaatgagcaaatttacacacaatttaagggatttaattccatcactgagtttatttgaaaaaaatcagaaatggatagcaaccattttatttagtagttctctggctattatacttaatatatttatataatatataacaatatatattatacttaatagccagagagtttacattttaggctgaagctttcctgaagataacagtccatttcttgtcctgcctctgctagaaatttgggcaaagtaacaatgcatttcagccacacacacagcttttgccaaagttgcttttgctgctgttgtttgagtcaagactatcttccttcgtatccctggctgctcttgaactcctgatccttctgcctcttccttcagagtgctgggattgtaggcatgtcctaccgtgcctgatatgccaggagtcttaacggcgagtaatgtttaggtaagaaggggtagaggaaaagactaaggtggtagaaacttactttgtagcatctttaaaagacatggtattgtttaagttttgaaattacagtaagtactaagtgttttttttgtaacctaaactgtatcatatttcaatactctctcaaacttacctgtatttagttatacctttaagaaactcagggttgccaggttggtggtgtaggcctttaaatccagcatgtggtgggcagacctgagttccaggtctaaatagggaattccaggtcagccaatgatacatagccttgactcaaaacagacagacagacagacagacagacagacagacagacagacacacacacacacacacacacacacacacacacacacacacatgaaattcaaagtcacaaggtgagatacagcttctatatgcataggtagctgctctccacctcctccacctccagtttctcagataccattcaggataggaggaacacatccaacagctaccaaatcaaaaagcagcagcagagaactataagcaaaaagaaaatcccaggctctgccagagcaacagcatgtcttacctatttcccagccagaagtgtactgtaaactaagtgccttcatcatatgcctttaacttatgatctcagcagcaccactcactgcctttagacaccagctttcctgtggtgctgtcctctagaaagcccattagcatttacgagtttgactatgagaacaggcacccctgggccagcagatgtgggttgtgtttgagaacatgtgtcagattgccgttctcagcattattctgagtggtgaaacttgtcctgtcctggcttttcatatcaaacagtttgttactccagagcgccattgccatttcagagggaaatgctcatttggggagcttttggtggctggaataatcactcttgcttaatgtcagaaacagtggcccaccagaccagcaccatagtgagtcaagatgcttgctggcatcatgtttgaaggtgttaataaaatacactttgtaggactggagagatggctcagaggttaagagcaccagctgctattccagaggtcctgagttcaattcccagcaaccacatggtggttcacaaccatccgttatgagatctggtgccctcttctggtgtgcagatatacatggaagcagaatgttgtatacataataaataacaaataaataaaatctttaaaaaatacaccttgtaaaatttaaacagattaaactattaatatatgttccattttgaaaaatccaggctctaccagctgagtagaagaaatcctgtaagccagacactcatggcatttgcagcgccctgagcaaaccagtactacaatttgttcgacatccttctgggatttttaaataatgtctgtttatgcacatgaacacatacacatattatttccttaccatgtagtattttgcaactgtagtcttctttagaatgtatatgttaagtatttataaaaataaatcatggcttattatatcaagataaatttaaatgtcctgtaagttcaccaacttaaatggaaaaagtcagtgtttttttttttttttgaagtatttccatagttgtgtaccactatcataattctcgagcattttaaaaaaggtttatgagtgtgtgctcatgtttgtgaatgtgtatacatgtctgtgcaggcaccccaaaaggtctaaagaggtcataggatcccttggagctggagttatatgtgtttgtgagcccctttacatgggtgttgggaaccgaactcgtgtcctcatgactgagcagtaaaaactctaaccactgagtaatctcttcagctcctagaacattttcaccactcctaaaagaatcctgttaactaaaagaatcatcagttagctgttgctcagatttcctcagtgcagccaaccacatgtggtatgttgaacattgctatctggttaaccttgtattgcattgtctcgtttcatttcaggccctgaaaatccttggctggtccaagcttatgtctcagcagctaagcacccatttgcttccgtggtggctcaggaggtttttcagagtggaatcattccttctgacactgacttccggatctacagggactttggaaacattccaggtactctgtcagtggcacagactattaggtaaaaaacttaacttcttgaggatgctgtatatgagagctttatcttctgactcaccaaagcagagttcttgatgatatgctttaaaaccccatagtaactgaaatgctgcctgctgtagggtggtgttgtggaccacagagtgggagatggagacaactgttgagttcttcacccccaaagatgccaagggtcctcagggtctttgtcttgcatttccaactcctttggtgacttgtatagaccaaattctattccccaagctttgttctctaatgtgcgacttaaaatgctttaattattatgttttaaattatggaccaaagctatagatttacaaaatctatacaaagaacagaaaaaagggtttataacattcatgaatatgacagacatcagtcaacctcatgctttgccattttgtcttttagaatttaatgttaaacaaacaggtctaacacaagtctggtctttaaagtaagatgactttttccattgtctgtcttaggaatagatttagcttttattgaaaatggatacatatatcacaccaagtatgacacagcggacagaattctcatagattccattcagagagcaggttggtatttaacaggtttggcttttgacatacaatgatgaaatatctagaaagtgtgttctttaccctgtgtggttgagagaccgtatgtggttaaatgagttagatttggagttggaaagataagggcttgaattttagtctttactgcctgacatagcaattaaaaacttagaaattgtcactgtggttacttagaaaagagtggctcagggctgtggtgggagatgcagattcactgtgaggatttggaaggggcagccccaggcttgtaggattgttgaatggtaatgaactccaggtagcatcaggaatgggtttgtggcatagctgagagtagagggcgataacatgggtccgtgatagggtggggaggacagatgaggccctgacctagcatagagcattgcaatgcttcccagagagccagagacattagggaggcaaacctgagccctgaagagttgatagggattggggttatggagagaagatgactttttaggtcagagcacagtatgggaaggaggaaacggggtagggcatgggagtggaaggcttcagactagaatgacgtatttcagaagtagaagacaaggttgaagcatatgggggaaggaaattgtagatgacttaaaaaccatcaagacttagtggtagggtactgcttaacatatgcaaggccctggattccaaccctagcattaaaaaacaagtggttggtaagatagttcagcagataaaggtacttgttgccatacctgacagcctcaatgtgatccctggaactcacacattagaaggagagaactgactccagaaagttgtcctgaccacatgcagtggcgtgcagcacccccaataaataaaaatgtgatttaaaatatttttaaattcagaaataagctaaaggaataagggattaatgcaggtctgagtctataaatgaactcattaaggtgattttaagtgttccctgtctggcaatgcagtatggggtagagggtgagtagttagccttctgacagtcatttatatgcaataagcagagccttgactagggctggcaaaagataggagcaaaagaaggagcgctgggaaagtaggtacgtgcattttatttggaatctctctgtctctcatctagacatattctgttaatctggacggttttagctatgttctaccattgttacttactgtgcaggcccagctgctaagtacttatcagtctctgggccccttcgtcaagatgataggattgctggcatacattaccacattttttttgttttgttgagataggatttctcatgtagcccatttttttgttttgttgagataggatttctcatgtagcccaggatgaccttgaagttgtcacccttctgccctctgactaaatgtgctttttatttttattggctcttgtttgtcaccctaagtacaggggaccaaacccagaccttgtgcatgcattccagtcaagcactgtatcactggtcccagagccacctctccagccccttttagaaaacattggttttacttttgtttaagagaaggtcttgctgtaagctcaggctagctttgaacttgctgtgtaacctaggctggcctcgaattcataatcctcctgccttttcttccccttcccaataattcttaacattctgtagaagctttttctgtgctgattaacatcatgagaagctttgtctgtttcaccactcagtttctggtctttagaacagggtctcacatagttatgtgttccacaaggaaggcctgaagtagagatttagggttataaagttgatcttagggtcaaggttgagcttctaagtgtagaggaagaaaagcaagagcaggggccttccttacctaggaaatttggtaagaaaggggggagcagtggatggtagaaagggtgcctgctcacactgctcccaggtacttctgtttcaaatagtgcctgatctgtttctactttgcatggtatgcgtaagtcaccctccaatagtttactagatcttatctttcttactaaaaggtgacaacattttagcagttcttaaatatctagctacatctgacatgctggcctcttcgtctgagtatcgacatgggaacgtggtcttctttgatgtgttcggcctgcttgtcatcgcatatccttctcgtgttggcacaataataaactacatggctgttacggctgctgttttgtacctggggaaaaaactgctgcagcccaaacacaggagtaagtatttccctctaaggtgtggattctgaatgcgggtgtcatttctggagagattttagctattgtttttatttcttcccaggaagtacagtacaggagaatattacttaatttatatttttagaaattcctagaaaagtactgaattggtatgctcattatactttcaggttggtgaagtcaacagtttttgcactcaaactgaaactggtaaagttcgccgatttgtctgccttagccaaactaatggaaagcagagccaaatagctaaataatgctgaagacctgttgtgcagtgcaatactctgtgccctgcagggatctgtggaagctgtctgttgtccatttgactctcacagttgcttgttttgttacgatgtaaaattactagtaatactgaaacagagctttaatattataaatgatatgagaggtgctttcatatgtgcttcttgaaattcagtaatattcagctctataacttgtcttaaaagttaaatttacatacaaccaaaaagaaaaaaacaggtttgtagaagctgactttttagtttttaaaactatttaggtattgtgtgtgtgtgtgtgcgcgtgtgcgtgtgcgtgtttgtgtgtgtgtgtgtgtgtgtgtgtgtgtgtgtgtgtgtgtgtgtgtgtgtgtgtacatatacaagtgtggaagacagtttgtgggacttggctgtctccttccaccatatgggtcctggggtcatcagcttgtcctgctcagccgtcctgcgggtgctgtagattgattgttagtgaaaagccccgttaagtcttctccactacaggccatttgcacagtccagaagatggatgcagcacttctggttaaactgttctcttctacccaaatcatttctgcttgaaatgtttcagaggctaaattgttgtgtgtcattcaagataagtatttagcagcaatttaaataactctttactaccagttattttccctgtcattgttttccaatgttaacatcttttaaaacatttttacatatgtgtgtgtgtgtgcatgtgtgggggtggtagtatgtgacagtgtgtatgtgtgaagtcattagacaacttgtgggcttcagttctgtgtggcctggggattgaactcaggctgttaagcttgtgtaacatgagttctgataggttgtaataataaaaacccagagtcaggtatatactgaaagatcagagaagtaaaggagccagacacatgagagacctcttatctctactgaatcttcaaaccaaatgggtgatcctgtatctaggaatctcagactgaatgccatgagctcctatctcttcctactttatattcctctctccgcatagccatatcactcttgtctccacctccctagtgctgggattaaaagcacaagattcccaagtactgagattaacggtatgagccactactgttggctatttctcttttagactggatcaatcctgtgtagctcagggtggtcttgaactcacatagatccgcctgcctttgcttctccagtgctgagattaaaggtgtgcaccacactgcctaggatctatggttaactagtgtggctagctccacacttagatctttgggtaagctttatttgttaggtcataaacaatttatcactacaggcttgtatggcaagtatacttgcctgctgaaccatcttgccagccatattctcttgtcttttagcaagagtttatatggaactttgctttttaaagatctttgctaatacttagataaacaaagcatccccaaaatggtgaagatttccacctctttgcctagtaagaatatctgaattgttcttatgagacatctcttaagcatttttattatcatgggacttttcactgtgctcttgaatatcatcctttattcttatcccattcagttttctacactctactacaattacagtagtgaattatttgttgtaatatttgtctctttagcactactaactggttttgtaattgatgtgatgaagatgatgacgttaactttttgttttctctttattagatgctgactacacgagagacttcttgtgtggacttgccatcactttcattagctggttcactagccttgttacagttcttattatagcagtgttcgtctctctcattggacagtctctctcatggtacaaccacttttatgttgctgtttgcctgtatggaactgcaacagtggctaaaataatactcatacatacccttgcaaaaagattttattatgtggtaagtggctgatgtgtttgttgttttctttttgctgctttcaagaattgaagacaaataagtgaaatttattgtgtatggtctttcagagctattagaaattgttcagcatggctatagaaaatgctgccatagtgttaatttcctggatttttctgattctgagaattgggatgcagaatttaagtgaagtcacaaagctgtgttttccgcagcatttggaatggtggtggtagtgaggcttgtttgcatggctttctgcctccactgttgtttctataacttatttatgtgtcaatagtactgtgctcttctggactttaaggctgatgatggtggcattactgaactctctgctgcatcacttgtacttaagcaatgtctgacacaacttgacacagtgagcacttctttcctaacagaatagtgcatttaaaatgttctcattggttttcccttcactctttcttttatttttaagattatatcatttctcccttctctttccaccttctaatccctcccatataccccttcctgctctctttcaaattcatgacctctattttcattagttgttacttgcatgtatgtatatgtgtatatgtgtatgttcatataccttttttagtctatacaccgttactcatgcatgtttttagacaaggccttttggtattggataaccaatttctaaaagactatttttctcctactctcagcattccttagttgcctgtttttctttgtgtagggttgaggccttgtgcagctcatttagacagtcatgttggtgagactttatggatgtagcttttgatattactaggagacagtctcatagcaaactccctgatcctctggctcttagaatctttgtacccccacctctgcgatgttccctgagccttaggttctagagctgtttatagatgtagccattgggactgggctccacaattttacattttgattggttgtggttttctgtaatggtctccatctgttgcaaagtttccttgattcagggtgaggactacacttatatgtgggtctaaggacatttagaatgtagttagggattaagaagccctgggtagctggctgggtttctagtaccaggcatgatttccctctgaatgtgtcttcagtcccattagagagcttgattactaccaatatatgtgtgccactactgcacccttagggttttcttgccatgctggtcattatagttcacaggcttcatagctgggtaggtaggactattggttgcttccctcctttggaagcttgcatgctgccttctggtaccccagggaggatgcattctggtccgttccaccttacaggcctgtgggtcctgtgtctgtacatagtgtcttgagcagtagggacttaccttccacctgtgaggggcaaccaagggcaataacaatagcctataatgttttgggactctcttgggcaactctgaccaaaatcttttaaaagagagcttcttaagcctggtgttaaggtttttgttagatggcctttagctcttggagggagcattctcagcccatatgagaaaatttcacttaaactatatatgtgtatttatgcacatcatagtatgattctgtaagactttttcagacatccttagttgttttacctcctcctaccaccttctatatttatctccttccccatctctaactagagtacccccctttcccatttctctgattagattatttttaccctgatataccctctattgtttcctccatcctcaccccacacatcccagcaatggtacctttttatctgcagttaaaggatttatactcacatttgaagatttggagctaggaactcttaaatgtatttgatgcaagttttggcaaaatgtgtctattatcaaaattaaagacacattattagagcccggtggtggtggcacacgcctttaatcccagcactatcgagaggcagaggcagacagatctctgagttcgaggccagcctggtcttcagagtgagttctaggacagccagggatacacagagaaaccctgtcttgacctccccaccctcacccccccccaaaatcccagctgtagacagaagtttctgtccagccctgtcctgcagctgttcagtccccaataaacacacagaggctaatgttaattatgaactgtctggcttattgcttaggcttattacaacaagctcttacaacttaaattaacccataattcttatctatgtttagtcacgtggcttggtaccttttctcagtaaggcattctcatcttgcttcctctgtgtctggctggcgactccatctctgcctttcttcttcccagcattctcctagtctggtagccccgcctatacttcctgcttggctattggtcaatcagtgttttattaaaccaatacaagtgacagatctttacagtgaacacatcaccccaacaaaacaaaacaaaatccatattattaggaatgggaagagaaatacagttttaaataattcatactgatttttagagaatatcctcatattattataatttcaaccgtgtaaaaatgagggatttcagttatgaagtaatagaccaaaaatgaactacagtaagaaagttctaatttaattttctaatgtaactgagagaaatcttagttctttgttttcaggacactcaatggacacccccactccctcctcagtgtgtcagtttgtcctgacatggattaagatggatgcctgaaagattatcatttagcaccctcttactagatacctttgttatctgtcatttaatgagaaaggatgtgaggaacccttccatgttagcataccctattgaagaaaggcattagccatctcctgtggctcagatcatacttttctcagggtggcttcagtgtcccatgcctgttctcagcatggttctctctgtaaatcagagtgtggttgaatagtgttgattggttagttgtggggtagaaatgctaaacaaaattccacttgctctcagattccagtggtctgatcacatagcatgtggtgctgaaggcacagtagaagagtaatgcttacagtatgcatttactttgtaacagtgcagaagatggagcccagggctttgcacatgcttgagcaagtgctcagctctagtctgtatccttggtgctcttgctgttttttggtgtacatgcccattgtatattcatgtgtccatatgtatggtgtgtattcgtgtgtgtgggtcaggacaacccacaagtgttcctctccaaccatcatctatcccccccccccccccgtcccccttcacatggaagtttttagattatttgttctctccttagaaatgcagaatctctactctgtttgctttctgccagcaccagccaggcctttgcagttctaccctcctcattctttttgggttccttttgctgttctctggaggtttttcttctcataagggccatgtcatgtaagtctgtgttaggctcattctttgcatattccaaagactcataaatcataccaaagccagtttgtcttgccacctccaaaatgggttctgtatccaaatcaaaaatgtcatttggtgtggttttgtgcatcttgtctagcatttccccaatttctgcctttggtactcttgccttcccagggtgaagggcatcagtggtcattgtttccccagaggcagcttaggcatgagcttccctgtctgtattgttaactgtgtctgtcttgatggctgcaggcctggaacagtcaaggagcaaaggagctgtttagataccggatctcactggcctggggcttgcttatcagggctaggttggctggctgattctcagggacctacctgcatttctctgtttatccaagctgggattaccagtgagtgccattgtgcccagctaatttctgtgggccctggggttggaatacacgtccccatccttgcttaatgtaacactttactatctcttttttgcttttacttttgggattcactaaatttcctcaggctggccctgaactcacactgtatcccaggtgggtcttgaacatgtgctccttctgccagcttcctgagtagctgggcttgtaggccagtaccatccgtgtgcctcactgttttagagactcttttagctgagtgctcctgagaatgtgatatctgtctttttgctcagcttcactttgtgcttatgaagtagtgctttgagaatgcagggggaggggcatgggttttgagtgagactttattcatgaaggtggtgacatttgaatggggctttagaagcttgagtgcctgatagagaacaggctggtgatagtcaaaagtgggaatgtgcaaggcacatttgggccatagtcaaagacaaagtctagtgtggtgaagacaagggaataaaaaccatatagtacacaggggaaggtcagggtgaaactggagcttgtccctaaatatcagttaggccaccattaacttattcatagtaggatagagttgagtggttttgtgatttagtaaaaaaaaaaaaaaactctggcaactattttggaaaaggacagcgtgagggatcgatagaggtgtggatggaaacatacttgaagactactttttcatttattcagctcaggcatttactgaaaaacatgctcaatagtttcagtgttccttacgaagctctttgagtgcattcagtttcagactgaattacttctgctattactattttgaatattttgaggcagagcctcactgtattcccagattgggtaagaatcttgttctgtaacccagcccagcttcatacttcagggtgttcgacccagcctctggagtgatgggaccactggtgtgcatcgcccatctagccttcaggttgaggtctgaaaattgttttcttttaagaccatgcctcttaacaatgggtggggcatctaagtatttaacgatccaaacctgtttggtagtgaactttaaagtgtggttccttaagacagaaatgagaataagagaaaaacaagcttaaagaccagccattctctctttggtatctatgcgctgtaattataatttgaggtttggatttatggaatcactttggtatgtcataatatttgaagtttcgtaggcagctttcttcttaaatagtataagatgcccttggactccatgtctttctttaaaaggaacttcaaacatatgagactagagtagaaaaaagtgtcagagtggcaaagatgatgaagtagcagaggagagacaggaaaatcaagccacacacccaccatgaccattgctgtgaagggtgaatggtgtgataggtgctttgtgatgctgtagcagctggtaatgtcctttgtgacccactagattgcttgtaacagtgtttggaagttgcagaaacaaaaggaattatgggatggatgtctttaggaatgtttccattgtgttgctcttgccttctttgtctagtcctgtgtagcagctgcagtcagtcacacctagcaggagtagcagtgtgagtgtttccttcatcaatttgaagggttgcccaggctggaaattatgcatttggccttgaagaaattgtaataagagaactttatgaatgactgtgaacaagattgcatttctctttctttcagaatgtcagcaaccagtatctgggagaagtgttttttgacacctcattgtttgtgcattgtggctttcttgttgttctcacttaccaaggattttgctctgcattcataagtgctatctgggtagcatttccattgttcacaaagctttgcgtgtacaaggacttcaagaagcacggtagggacattttggtttttgataaaaatgggaactgtaataaaaatgcaaggctcctagtgattatatatctaaccaactgggtttccaaaataatttattttttatgtcatacaattatttaccttatactgtatcccccatcccattctcatgtttctgaataatattacttttaatattactttaatatcctccctgatgaaaatgcctgcttgcactagatcacatgtaccaaagggactagagtgacatctgactcagtttctgccaaagcaggtgaacactgtgaaaaggagcccctcatcttatcatggactcttacaggcttgttttctttcttttcccctaggtgcccaaggaagattgattgccttttaccttttggggatgtctatcccatatctttatggactgtacctcatctgggctgtattcgagatgtttactcctatccttggaagaagcggttcggaaatccctcctgatgttgtgctagcctccattctggctgtctgtgtgatgattctctcctcctattttgtaaggaaaaatgggttttgtttgtttttattttttatatatgtgatgactttagctgtactggattctgtgaatttatgttgcttatactttattaagaaaaaattaaacaaaagatagggtcagtgtttgtacatggtgggttcagaaccaagaggatctgtgagttccagaccagccagggctatatggtgagcctccatcttattgttgctgttttaatgcatgcatatatatatatatatatatatatatatatatatatatatatatctcacatagatatgtgtgtgtttatacacacacacacacacacacacacacacacagagagagagagagagagagagagagagagagagagagagagagagagagactgccttccatatatatcctagcatggtgaggccctgtcttattgttactgtttaaaaaaaaacacatacatacatacatatatatggagaggggtggggagagagacttttatatctatcctaacagatatggacgtgcagaatatataccaagtgaggactgaaatgttctgttcctgaactttcacaatagtccctatgaacatgttttgaagatggtagttaagaggccaatgttaatacagagtagtttcagtaatgttttttatgtgtgccattgaggcattttcattatcattttactacttcattgctgtcatgtcaaaatgcatgaagttttcctcttggggtgatacccatacatgcttatcagtctatgagtgaactgcccaggtatgcaatcttaccttggtttgtctggacctcttttctcatgggactccttaatggaaagaaaagatggttgattaatgtggactagaacaagttgttttggcaagatgtctaaagcagatgctgagtctctctagggaaagcagctgttttgtgctttttcagttgcaattcctaaggagtacttactgagcacctattatatagggtgccttgagatctgaggctagggaaccaagtgaagacagggactgcagttcctgactgcttagatgttcatggacgatggtgagctttttcatacctgcagtgaaaggagttccttgtggaaattaagtcctgaagacctagcgaggtaagggggatgccacagtcatagtccacaccatcaatggaatttccccagctactaggaaagctctgcatttactaaagtcattcttatgcacactgcttgctattggctatactagtactaaaagaaaacctgacatctcaactgcttgccattaagatacagattaaaggctgaggcagtagctcactgatgcatgaggccctaggttcagttccccaacacagaaatgacctctcctcccaacaaacaaaacctacagggtaatgattagctcttactggtatttacagagggtgatggaatcctaatgtttgttgtttacttctagttttattattaacccttcaaccatgtatttaagtgttcttacttttcttatcactgtggcaaatacttggtaaaaataaggctgggcgttggtggcgcacgcctttaatcccagcactcggaaggcagaggcaggcggatctgtgagttcaaggccagcctggtctccagagcgagtgccaggataggcttcaaagctacacagagaaaccctgtctcgaaaaaccaaaaaaaaatttaaaaaaaaaaaaaaaaaagaaaggaaaaaattattctggctcatggttcctgaggatactgtccatcatggtggggaaggcagtggagcttctggtggtgggaacctgtggcggtctagatgagattgtgacaacaaacccaagacctgttttcttcacttagactttgcctgtgtaattgctggtttccccagatagcacttcccagcttgaagggaacatttcccactcaaaccataataacagtttgagagatagaggcccgggcatgaagacacataatggtagtcccagcacttgggaggctgaggcaggaaggtcctgagtttgaagccaacctcgactacatattgagaccttgtcctaaaaaacaaaatgcaactgtaaaggagagagtagagttctgtcctctgtaaatggaagtctggtgtaaaggtagctatgaattatgaagcaggttttcattgcactttctctatagagtagtggttctcaactttcctaatgttgtgaccctttaatacagttcctcatgtgctgaccccaaccatagaagttatttttgttgctacttcataactacagttttgctactgttgtgaatcataatgtaaatacgtgtttctgatggtctaaggtgactctgtgaacaggctgttcgaccaccaggttgagaaccattgtcctagatggttgaaacttgtggtgcctataaaggtgattcagatgtaggacatttgagtcctatcccatgatcatgtggaagggagaataaggagcctgtgaaactggagagtaggaaagtcctccagtcatggctttcttggaagctaaaagaacgagattagtgttaccagaaagtattattaggaagggttttggacagaatacctcttggaatattaaaaaaaatttacaagtgagggtgttggaatgtacgtgagtctaaggccaggctggtatgagttataggttaggtgaggacaaggctatgtagtaagaacctgtctcaaaaccaccattcttcccctagacagaaagaaaccatatttccttttcattactatgtgaaaatggtgctgttactcttacctgtaagtcatctttctctttgttttcttttttaaaaatatatataaattttatttaaattagaaacaatcttattttacatatcaaccccagttccctctccctcccatcctcccaatgacccccttatcccacccccccatccactccccaggaagggtgaggccttcaatgatcgatcatcaaaatctgtcaagtcatttggggcagggcctaggccctcccctgtgtatctaggctaagagagtgtccctccctggggaatgggctcacgaagtccattcctgctctagggatacatcctggttctactgccagaggccccatagactgcccagtgctcctgacacccatgttcagggggcctggtttggtcctattggttccccaactgtcagactggggaccatgaactcccactttctcaggtcagctgtttccgtgggttttcccagtgtggtcttgacccctttgttcgtcactcccccctctctgaaactggattccaggagtttggctcagtgcttagctgtagatctctgcttctgcttccatcagctactggatggagactctaggatggcatttaaggtagtcatcattctcattataggggaaggacatttaaggtagcctctccactactgcttagggtcctagttggggtcatccttgtggagctctgtacaattccctagtgccggatttctctgtaaacctacagtggctccctctattgatgtgtctcttttcttgctcttctctttcgtctccccactcaatcttcctgatccctcatgttctccccctcttctcccctccctcccccaatgctccccatttgttcaggggctcttgtctctttctgcttaactgttttcttatttatgtgccacagttgaagacagtggcttcctaactgaatgaggttgttccttgggtaatagagcactaaaccataatctttacttcagagaagtgtcttagtcattgaggcttttaaaacacatgttttagaaaacaattacattcttgttaagtgataagttaccatactccctagagttattcttggttgggtaccatggttgtatccattggctgagagctgaaataggcttgatgataagcatggggtaacagccctgtcatagttcacacaggctacactggggtcctttatatgtgccctttttttcttttcatgtgtgttgtatacacatatgtgggtgaatggcattctgagggcacagaacggcattaggtaccttcccctaccaggccctgtcttatgtccctgagagaataactctcactgaattggaagcttgcttttcagcgaggctggccaacctctgagctcccaggatctgcctgtctccgcccccagtgctggggcatgggtagtcatgcctggctttttacatgggtacaggggattaaaactcaagtcttcatgtgtgcacagtgagtgctcttacgcactgagccatcttccaagatccactactcattaattttggtgttttgacacaaggtctaacgtggcccaggctagccttaaactttctgaagatgaccttgaacttgtgatccttttgcctccactaccaagtgctgggattacaggactgtgctaccacacatagcttcttcatttgattctgtactcatttaagaacttaaaaaatgatataagattaaaaacatttaaggcaattcaactgtaaaggtgcttaactatggaatctaagcatactatctctttatggccacaccatcatcttcactcagagagtccattcatttataacctcccagaaggaagagtcttacaatttggagaagagggaacttcagtaggaagtggtagcttcaagttggaatttaggacagctttggcagtagcaaggcttgggggtgccagaactacagcactatagcaagcattgaaacataaaataaataatatacatgtaactaaaatatattcatttctttcctgttccattccttcatccaactttaactgaacagcatctgtatgtccaaatttgccaagcttccagtggaggggaagctaattacttgggacattttaaacatttgggacattatgacagttaagtagaggaacaagtagggttccagttgttttgctgtctggggtgatcatttcctaatgtaataaacaagagtaaggcctcccatccaagaatactgttgggttgaaattgcccccaaaaggatatgggaacacgagatacgagccgcttttaactttgcatagactttgatacatatttttttgttcttctcaatgaaatatgtttgtattcatgttcttcgtgagtttagggtgtaggcaggaagatgaagaatatattttgccaaccttgcaactgagctattcatgtttacccttcctaacttcagattcattgtttagtgtttacaatggttaacttaaaagcacaatactgtttcatagtgtagtttttcttcaaatggaactttcagaagatccatctaaaaactagtctgtaggactccaactcttaatagtattttatacacacggaaggtggaatctgaattttgttgaaacacatgcttaggcataaaaactcacctttgacagtttggcagctttgatgccacgcttgggttcagttgagtgtagtctgctgtgcagggttggctgttgttggccagtgagtcacagaaggcagtgacttgactgctaatggattctggtcctttttcctttgatgtttgagcacagagtcattatgctttgtttccattctccctggtggtttctggcccactgtcacaaagttccgttctggccagttgaaggcacctgtcattttctaggctctgacggaaatacctgaggaattagtgctttgttcactgggtgttacagtacattacccaggctcctagtgacaatactcactaaaaaaaaatcatttaaaattcctctctaccagtggtatgaattcataatttttctgtgtttgtatttagattaaattcatctaccttgtgaaaagcacaaagaaaaccatgctgactctaacaatggtgtgcgcagtcacactcctcctcgtctgcggtggagtctttttcccatacagctccaatcctgcgagtccaaagccaaagagagtgttccttcaggtaagggcagttcttcataagcagtgagagtcagaagatgaaatttgctgtgtgtgctttgagctccactagtgaacagaaaaactgacttttctgccgttgacataatgtagttggtctagatttctgtgtataaacaataaggaatactgaccatcagtgggcattcttgttagctagacacactttccatgatgtatgtgtgtgtgtgtgtgtgtataatagatgcacatatataatctggaaatcatgaacatttgaaatacaaattgcataaatatctgtagactgactaaaaagtcttaaactattactagcagaataaaatagaaattaaaaattgctagtaaaattgagccttagttacattcaatgtaatatgtgatgaaaataatgtaaaaagggattattaaaatgaagtttagaactttctttagatttcaggtctttttccaaaacctcttagaagtggtactatataaccagaggctccttttcagttttgttaaagtttttagagtggtcacacaatgctgagacataatttagacaattattcaaggactgtaagattaaaaatactgcaatttgagagattttgaaaggaagccaactagtctttggtagtagtcttaggacagtgatgttttgtgtaaaaacttcggtgaagaacagtttttaagacggtcttcagtggcatggcaattgttccaactctggcagtaggatttaggaaaggctacatttttagttttaaaaggactgatttgttttgggttcttttccccctgatgggcaaaatcataactattttaggccctgctagctgtgcaagtttctgtcactgataacctgctttcctagagtgaaagcagctatattcgacccaaagctagcatatgcttccttgtgccatgccgtgccagccctttccgtactgttccctggctccaggctgttgtaagccctttgggcattaagactgacatatacacggtctgctgccatgcctgtctttttctgtacatggattaagtgcatgtagtgcactgaggaggaaatgactgtgcttatgtacatgtgctttccatgttttcttttaaatctttttctgagaggagttataacttaaatttgagcagaatttcaatttgtcatttgggtttttaagaaagacatttagattatgtataatatgtctgtgtgggtatgtgtatctgagtgcaggtgccctaggaagccagagatgtcgattccctggagctggagttacaggttgttataagccacctgatgtggttgcttggaatttaaccagggtcctctggaagagcggtacatgctctaaccactataagcgatctcaccagcccattttgttttctgaaacaggctcttacagtattgcctagagttccttcaatttctgggctcaaatgaccctccacttcagccttctgagtaattgagactacagtatacacgatgttcctcatcaattttatatactcccccccccccacacacacacatacagggattctctgtgtaacagctctggctgtcttggaactctctttgtagaccaggatggccttgaactcacagagatccgcctgcctctgcctcccaagtactgggattaaagatgtatcccaccaatacccagctaagttttatgtacaatttaaatatacttcaactatatttgtgatttacaataaaacagtcatttatgcatctgtcatctagtttaaaaggaaaaaaaacactgacaataacttagtaattattaagtttcccttttgtttcctgtttctaatcagttttggatggggtggggatgtgggtgaagtagctaaagcagtttccttacttactagtctgttcttttcagcacatgagtagaacttttcataatttggaaggaaatgtagtaaaaagagactctggaatatggatcaatgggtttgattatactgggatgtctcacgtaacacctcacattcctgagatcaatgatacaatccgagctcactgtgaggagaatgccccactctgtggcttcccttggtatcttccagtgcactttctgatcaggttggtcattactttttgcttaagttgggggttagtacccaaactctgtcaatgtatcaggatttttattcattgtaacttacccttaattcggtcaaatgtttgtaatactttacaaagaccaacaacaaaaaaatgcttgtttataatatgactacaaaatgttcatttcgttagtcagataatagactcaggaaacctcaagaaacctgagtagtagttagaaagggtgatcctcttaatataatacaagcaacagcttgagatgctcttagagttggcatctcagaattgcatccgaggaaacagacagtggaattgcttaggtaatccctgttcttttaaaaagacacattttatgtgtatgtatgttctctctgcatttatgttcataacatatgaacatatgttatgttcatatgtgcatttgtgtgtgccttatacctttgaaggtcagaagacagcgttgaatctctggctctggagttgcaggtggctgtcagttgacatgtagatgctgggaactgaacctgggtcctctgcaaaagcagccaagcttttgactgtttagccatctttccagcccttaacttctttgatcttaaagttaggatttgttacacagcctgggcatcagagaagctggcatcatttatcattttcattagctgttttcataccccttatgtattctgaactcttctgtgagttatgttttacttattgtcagttaagaatgcatcctaaatattaatgctacctttccaataggaaaaattggtatcttccggctccagaaatttctccaagaaatcctgcacatttcagacttatatccaaagagaagacaccatggggttctataaaattgacctttgaagcaacaggtgagccagttttcttgtcaccccacttccgcagctttatagtaagttgcgatatatgtcttcccacccactatatataagagcaacatccgtccatcgatccatccatcttctgagacagtctcaaatgtagaggtcaggctggcctctgattcatgaccttcctgccttagcctcttgagtgctggaaccatgtagtatttctaatagtaacggaaacttacttctttgagaaaatctaatacactttattgcttagaacagtttcaggataaaaaaaaaatgagcaaaactacagtttaaatcttaccagttttctgctctggactacttattttgttctacttgtttttttttttttttatttaatttagtccttttcttgtctactaaggtggaagcttaacttacatcctttagattgttatccctaatatatgcattcagtgctataaatttgaatattgcttatgctcttgattaaggtttcttatttggctctgggactacaaaataggtatacaaatcatttactgataataaatcagagaaatttattttcaaagttctttgtgtacatataattttaccagttactaacaacaaaagcaagtttgcacactggggagatggatgtcttcgtatatttttttacatgaagagttacatcttgagtacttgctgttgtaggatttagagaatcttctgtatttccaaaagttgaccagtattttgactttataatcatcagtgctgagagtacctccagtaagtatgtagtacaaatggcagaagtggttagggccattgcagaaaattgtaaaattttgtcctaatcataagacaaaattcatttaacaagtcttaaaattaaagtctaacatattctagtctaaacacagtcagatttgatatttatatgctggaggtaaaactgttgtaagtgtatgactatatgacattacatttctgcaagagaagagaattttgtatagacagtataaacactaactcataacctagtgaatatcaaatctgagccagtgtgcttcaggcagcatttggtagcattgcatacacagtacaaaggattcacatcatgtgctcagatccaaggctgtgtgtaagtcatggagtgcatcataggcgaaggcgtctagaagtatcttggattcattacatgtttgtcctaattagttttctgttgctgtgttaatacactatttctaacacaacccgtaaagtaaagcatttagtctgggactcatagttcccgagggtcagagtccatgacatggaacaaggtgacaggcatggcgctggagcagtagctgagagcttctatttttttgtatgagcataaagcagagagtagtaagtaggaatggtgtgggcttttgaaacctcagagcctacccccagtgacacacttccgagttcttgccaacaattcttccaactgggggaaccaagcattcaactacacaagcccatgggaggccattctcattcagactattacaatgtttgattattttggttgtggcatattcagaaaccttttactgttgctaattttccctcaacctccccccaccccacacacacatttgagtcctagaaccagtaaggcactgtggaccatagatgatgaagctggctcttgatcccacaaattttaagttgtgttttagtgtttagttcaaaatactaaaacaaaaccctttctcttgacacttgttacctgaacttcagccatgcaaggtaagtggtctacccgaccccacatcccagcccttggctcttctgtattgacccacttgttacagaagtgtgctttttagtttccaaataatctagcttcttttctgacgtcagcttcttgtttcatttcattttgagccaagaaatcgtttgtatgatttgtagcctgaatgttatggtgtgctgtatgctaaggattctgtggcttgggtaatgctccttgtgagttgctactgttggaggggcattctgtgactgtcctgtgggtccagtttcagtgtagctgtttttgtctgatccatattcaggctttgctgttaggtgcatatattttaattactcttctatcttcttatagactactttttgactttatataattgcctttttaccaatgaaaatctcctttacttgagtcagctgtaactctccaaagctttcttttgattactgctaattaaaaaccgtgtattttctgcctatatttattttcgtgctatatacacattaatgttccatcaccaagttacatctccagcaccttccatttacttttcatctatgtgtctttaattttatataggtagtacttagttgggtcttgttttatgacccagtttaaatgggttaatagttttgcccttgttttttatcttccaccctttttatgccttaatgtagttttcactgagttattaactactttattttgttttgtttataagttttgtgatgggcgctaggcattggtggcacatgcctttaataatcctagcactcgggaggcagaggctgcggatctctgtgagtacgaggccagcctggtctccagagcgagtgccaggataggctccaaaactacacagagaaacccggtctcgaaaaacaaaacaaaaaaaaaacaaaacaaaacaaaaacaaaacgaaacaaaaattgtgatgggcagtgatggagtatgcctttaatcctagcacccaggaaacaggcagatctctgtgaattcaaggccagcctggtctacatagtgagttccaggacagctaggggctacacacagaaaccgtgtttttaaacaaaattttgcatttgcatgtatgtgtctgtaaatgtatgccatatatctgcagatactcaggcaggaaagagagtgttggaccctcaggaactggagttaaaggcagctatgaactgcccaatgtgggtgctgggaactaaactctggttctcagaaagggcagcaagtgttcttaactgctgagccatctctctagttccgctatagttttatttttagtgattgccctagagtttgaaatgtgtatctacagctaatccagtttcactttcaaacaacactgtactgcttggtgggtgtgcctttggtttgcttgagaccgggtcctgctctgtagctcattcttgcctcagcttgtgattctcccgcctctgggttccaggtgtcccaccacacttggccaactattttattaaaaattttaaccctttctctcccagtgtcattattcaaatagtcaaatacaaaggccaattaaaatcaggttggatgtggttgtgcatactttattccaggggaggcaagcagatctttgtgttcaaggccaacctggtctacatatggaactccaggatagccaggtaacatagtgagcagcagatgctcttaatagctgaacatcctccagccccaagtcaaacttatttttatggttgctgaggacttgcagtaagtctgtgtcctcagttcacccccttgggagtacatgacattggcctcaaaagcaacaggcaagtcccgtgacactgcttcttaagatgattagagtttatctcctttagactcatttatttactttttggacaagctagcttcaaactcaaactcatggtctccctgcctcagtctcctgagggactactggattgtgccacttggtgattgtgacttttgtaggttttttttgggggggggcgggtggtagggtttctatgtgtagccttggctgtcttggaactcactctgtacaggctggccccaaactcagagatccgcctgcctctggactgctggactaaaggcgtgtgccaccactgcccagcctggttatgccttttaagaagccttactgaacatgtagtgttggtcattgtcaaacagatgcgcattgatctgaagacttgactcttcccttttccatgtttagtgttctgggatttctctcgcagtgccaccagccgatgtactacttccctcaagtaaaattaatgaagttgtgctgcttgcagagtgactctagacttcttggcataacattttgggtctttggtataaagcctcatgggcatctctagctattcttcagtaagcaaatcaggattatttccctttctgatcaattgtcctttgtgggaatgtgatggttaactgtgtcaatccggcgagactaaatagtaccttgatatttggccaagttatcccagacttttctgataacatacaaatagtggatttgaatcaggttgatcagttaccctagtccaaacactgagagccttaaggaactagccagattacttttcaactcttcctgcaatcttgggggtggggattaggtaatttccatcagtagttacttttctcatttagattctgtcttttttgttctcttatccttgttgctagatactgaatgtccagagctagtaaacctcctgccttgtggagagtctacctaaagtcatagcacagatgaaccatgatagtatgtttgggtgttaactgtattgcttgtcactgctgactgatggaaatgttcctcttataggaccaagccatatgtctttctatgttcgaacccacaaaggatcaacgctgtctcagtggtctcttggcaatggcattccagtcacaagcagaggaggggactactttgtgttttattcccatggactccaggcctctgcatggcagttctggatagaagtacaggtgggaatttctcaggctcccagatattactcagctaccttggagttcagtgttctggcttcagagaactaactgattttctctagcaggtgtcagaagaacagccagaaggaatggtcacggtggccattgctgcccactatctatcaggggaagacaagagatcttctcagctcgatgctctgaaagagaagttcccagattggacatttccctctgcgtgggtttgcacctacagcctttttgtgttttaattgcgtggatgggctttgagtacatgccccttagacattccatgggacagtttctctcccatgttatatggatatatgtaacacaagtcaatgagttttagtgagcgtatgttcaaagagcttctgggataatactcttcagggacaagtaccatatgggttaaactttgggatagtgatgtctggcctttttgtcacttgaaaattccagttttcaggcacttttaagcacatgtggatactgccttttatacatgttagttgtatgactgtaaggactcagcaacatagcacttcagtagctttcctttgaggaacagttagactactgttaatgaaataggtaagtccactgttgtcagtggatggtgggtaaaataccattccctgggatagtggctctcgcctgtaaaaagtgactgccatgaagaaggaagtcccgagagctacatttctttatgtctgttctgaagcttgagccatgggcctgactccaagctctgaaagccacttctggaccgctttcctgaggtagcattcgtcgtcggctttcccctcaaaatgctcctgtcatttagggagagaacatttttcagctacattcccttctcacagttcatgggttgctttatttgtgcaatttaagacagaacaccgagttgccagcatggctcttctgaggtagaagaggaggagggtggggtgttctatatagtatttattctcttcattttataggcatcctctgttatacaaggtcaatcctttacaacataatttattgctgcattttgttttctgttttgtagcaagtgaataagttcttagaacttgctgtctgtgagattggctgtcctgatactgaggttgtggcttacacaggaatgagacaactacacctgaatctgttaagtgttcagaccctgagtaaaagcagcagtatggtttaatggttttcatttggaagcagggatgcagcctgtgaagtttgccacagcagtgcctcttgtggcttctttaggttccatcggtgacagagacgatgagatgaacaataaaatatgctagcttcttttttacattaacaaaaaaaaaaaagacaaaatttgagttagtcaacaaatatgatccaaaatatagttgaaagaaaagccacagtaaacccaaaacaaaataaaatatacttctcaggtaggaacagaaaggtttttctcagagtggccctcagagccatctgaatttcagcaagagcagagttaagtgtgcattgcaggagaaaactttcttaaaatcgcttgtgtggcagtcagtttctaatcatgttccttgtgttgcctgcttaatctctaactccttaaaaactgtctggacccatgcagacatgagggctgcagctagagctggatgctaacgtctgactgtcatatgtactgacactgtatagtggagccactggttttgatggacttacagaaatcttatctaacagtgcttcaagtgtctggctcttgctgtgtatgcattgtttgtcaggtagtacttaacatctgcagcctgtatagaatcacagctcatgaaaataatagtgctaatagctaaatgaactttaaaatataggcggatgttctgttcctgctttaatctaaaattgattactagaaattagagaaggggaagcaaaacatcatgctgaagaagcatataaaaacaagatgttctctgatttctttccttttagcagggtgtctttgtccttttcggcataatcatggttttccttttgcctttgggttatttctctatgcaaacagttttgattttctttaacattatgaaactttgatattatgcacccagtaacaagatgctcagtttcaggaacatgcttaaaggccagaaatagtcaagtaattaatacagtattcatggcttttaataagcacactaggtagttatcagtaaccccctcttttaaagattatctgatcatttgagtaattcacttctgaaagtatactttcaagttctaagtaatgcatttcccccctaatgagtataaatataagcagcacaatagggaggagtataaagaactgtgatttcacagttcttaatatttaagaatgattgatcttgttctacgaagtgttttccagttagcagctgtaattaaatgtccaagattccccaaggttttaccatgaaggaggttgacccacaagcagtgtacatgattcaggaagctgctgggagatttgttgagggttaattgttgccttacaatgttatgaaataaacttttttaacatactggttggaaaaaatggatttttacaactgatttgattctatcaacagtttaaggctgttttatatccctagtctttttatataaaaaaatctttaaaaagatctacatgacttgagcatcactgctattttaataagtggtataagcaaagaattcaagatgggaatgctgacttcacatggagtgttttacctgcaatgaaatgatgcatctgcattccatagaaataaaattaccctgcttagcaaatggtaaaatcccagctgtatttgggcttaaatcatctccatgggaagaggaaatcacaaaagttttttttttttttttttttttttttttttttttaaattaggggctagggataagagcagtgaaaaaacttaccttgtaaaaactgacctacagtaattcatcacccaaggacaggctggtgacatttctcaaagctcttaattttctgtggggattccttcccagcagttcaatacaaagggaaacaacaattttggtcttcttcttttagggccaataaagacacaatgcatgtatgtatgcttcattatgttgaaattttagaaacatacttgattgcaaaaattattgagaatttatttaatccaattatcctgagcaagtagaacactaacaatgctctgttctgatcacctcaagaggacttcctctacctggttagaggtcatcagtgagaacccagagcatcatacttaatgataaaagactggaagaagacaagatacccatcattgccactcctactttgaacatcattctggtggttccagccagggcaacctggcaaggaaagacaaagcatttggatcctacatgcaaacctaaaattatatctggctgcagatgacatgactgtctatacagaaagtcaaaaaatccaaagatgaaattaaacattccatctataagaataccaagaagaatgaaacagaacaaaagcaaaactacaaaataccgcagaaagaaatgaaaggcctagaaggaaagatagcatgcatgcactgggtaagcatggcactaaaaaggactgcattcttcagatttgtccacacactgcacatgattcctatgcagagtgccactggaaaagatggtcccaaattcctagagtcctggaacagcccaaacagccttgaatgcataaatacacgtagcgcttgcacttccaatccagcgtgctgctaccataaacggatgactgtaacagatgcccatcattacaacagagtccagaaacaagcccacacatttatagtctgtttctgacagttcactgggggaaaagtctttttcacaaacagtactcagacaactgagtatccatatgcaaaagatagagttcttaatatatacaaaaattaattcaaaatgggtcaaaatgtttaagctacaacttataaagcataggcataaatacaaccttgggttaaattatagtttcccagttttgacaaaagcacaaacaacaagaatagaataaactggactcctatcaacaagaaaagctgttccaaaagatagtatcaagacaggggaatcataaagaatgagaaaatactaatcataaacttgggttaggccttgtatacaaaaatacataaaaaccactggcaagccaaagacaaaggtatccaagtgtctgatggcgtatcattttcatgcagctcttggaagactgactaagatggtaagtttaggtagcagaagctggagtcttcattcacagtaatgggaactttaggcatcctgacatagagaacttggtatttatttgctcaaggacatagtcactacatcatccagcaattccacttctacagagaattcaaaacacatccatacagaaaagcctggttccccaatcttcttccttacttatggggatatggtccaagatcctcattgggttcctgaaaccacagatacatcagttccccctatatattacatccacgataaaagatgataaaaagagttaggtacaacaggaaataggtataacagtatgctgtaataaaagctatttaatacttggaaactgtttatgtctatacagttctctttggacttcagttgagggcaaagcagagtaagggagaactatgtgaatgtttatagtgttataatctaaagtcagaaacgcaaactaacctttaaatggacagtaaacagccacacaacagcattattcagctttaaaaaagtaaaatacatataatacgtaaagaattttgaaaacataatgtcaaggtaataataaacatccacatactacatgtttatgaaatgtctaataaggaaatccacacaacatatttaagagacatgggaaccgtgctaatcaatcattttcaatttacctactagagatgacacctactttcctgtttggtgatcacatggtgtgcatgcatcattttctatcatttcttaactgtatttgaacacacacacccatggtatgaagggttcaatattctgtcatcaggtccttggatgttcccactctgttatgatgggtgtgggggaccatggcagattccatgtccagcatggctgagggacaaacatgccaggcagacagagcttaagtgagaagttttattagaaaggggagggaagggggagacaggaaaagtcctgtctgccccaggggaacagccggaaagagcagaaggagaggagtgagaaagagagcagaagtgtgtgtgtgtgtgtgtgtgtgtgtgtgtgtgtgtgtgtgtgtgtgtgtgtgtgaaggagaggagtgagaaagagcagaagtgtgtgtgtgtgtgtgtgtgtgtgtgtgtgtgtgtgtgtgtgtgtgtgtgtgtgtgtctgtcttttaaaggggtcctttgcacctgggctaaccagggcactgcctgagtgcattctgccagatgacatgggcaggccagcataatgcctaagtccttacagtatctacatatattttaaatacatttgtctgaacttctaggaatttcatttaggagaatgtaagtgatggggactgcaaagtgaaaattactttttgtggcatttaatacataacctgagataagtaaacaaaagctcatataatagttttattaccctttaccagggggtgggggaatacatattacagaagcagcagcaattctaattacaagcaaaggttgtttttaccccaaatgatttgttttggtgtcagcaagaaatataagcatatatgctaactttcaaacagttatgctgaatatttaagttcattaaagatatggcttacacagttgatgtttgaaccaaacaatacagcaaaacaaaatttttaaagtatataaccactaaaggataattttcttaagctcaccacatttcttgtcttggtgtttcctagttctactagctagacactatgttttattgaagagtcattcccagcctgaaccacaggagtaacattgactaatgcagaacctgctttaagattgtgcagcggtgctgagatgacagcatggtagcacagtcaggaaagcccagcaactggagcagctgcaaagttacaaattggcatatagcctgggcaaggctctgcctcaaaaaaaaaaaaaagggtggggtggggtgggggctgggatatgacttactagcggagtacttggttagaggccttaggctcatcttcagtactgctccaccaccaccaaaaaaagtgagattaactcagcagcagccatttaagacatgaaaagaccactgctgcttatgacggtaaattgtttttattaactaaatagtcacactagaaagtgacttgataaaaaagaaatgctggctcttctgcctaatggaatgggacagaagaaatgtcagcttagtttttttttttttttttttttttttttttcctgcactgcatatacttcataggaaactttattctgtattttaaaattcagaacaaggtggtggttgagacgacttaaataaagtagcaccagaaggaccaggtaacaacagtcacatatttcacccattcaggagttttattatgtaaaattattgcacttctaatgtagaaagtaaataacagtaaattaccaaatttaataattttaaatagttggtgaaatctgaagtaatttcaaaataattttgaggttccctctaaacaatattgcctaaaggactaaatctctctttaaaaaggagaatagagggctgaattttatttctaagctatatctgcactataagagaggctgttttacatagtggtacgaatttggtccacatcaaatacattgtgttataaaaataaacaagatttcataaaaaataacattgcattccttgttcaaattgcacagtacaaataagctatctaaattaatactgttatgaataattagaattacatatggtgagtatgtgtttagtctgaagcaactgaatatgtagttagttctgctttcataatgtatgaaaactaaaatttaagtcatatctagaaatacataaaatatttttaaactttacaatgaagaatttacaaactaatttttagtagctgataatacaggatcccacagtctatttacataaaaatcccatttttattcgatttacaaaagcaataaataagaaactacattaatttgcacaaaacctcttccacttcatgatcagtgggactactactactactttacagctgagccaataacctgtctctatgaagacctctcattttggaaagaagagcaagtcttgtctttattccaagagtgagtagagtcatgcagaatccagcataaaacctcacagagtataatacatgccttaaaaatatggacagtgcctttgcatatatttacataagagtattcacaaaaagatacagttctttgatacaaaaatttagtggtgtcagcataattgacaagaaccccctcaccctctgtccacactgatatagtaagaattcagcttgctcaaacacgcacattaacttccattggttcaggactgctagagaacacagtactaaatccaaagggtctcggtccactgacccatattgtgcaagtgcagcatctattcagaggaccaactagagtccagctgactctatacaaggaagcaaacaagtagctcaggtacctgatgagctacagcaagcaccttagcatttatttaaaagaaagttaaaaaaaaacaaccgaccgcacaaaaacaaaaccagcctagacacacactgaacctgaaaatatataagctataagtagtgaaaaagctcacctggggcaaaataatccctacacattaacaactaccgatctgttgggaataaaaccaaaatacatctatgttatgctcattactttctagtggagcttaagttttcttatgaaaatgctttgataccacatttttatggagtcaaagagatttagaggaagagttcattaacatataataatactttatcaaagagtttctgacccttgttctgttacctgttaaatcacttggtcaggtcaccatgtactcagttgcacactgctgtgattaatactgcctgttgtgatgtttcttgctgttgtcaggacacagaacagtcataagccccatcctggaatggctcctcctcatctgcttgtgttgtgtcctcttcattccggctgaccacactgttactcccggtctcactctgagagatgcttgcacgactagaagagcccctgctctcctctgctctggggctggtctgttcaggagtcttacccactgttattggctggaaggtgtcaggctggacctgctcttctgttatttcactgagcttctgcagttgtggcttaatgatgtttaaaaatggcttatatccagggctgagtaaagggggaaaaattagttgtcatctgctgtaattcaaaagacttgctagaggggctggggagatagcttgtgtgcaggcatgaggtcttgagttcaatccctagcacccgcataaaaagctgttgtggtgctgagaaggcacagatagggtttctggaggcatgcttaacagccagcctagccaaatcagtgagccctagatcccagtgagagaccctgtctcaaaaaagaaggtggacagcccttgtggaatggcacctgaagctgacctctgtcttctgcacatgtacaagtagagtgcatacaaacacgcacaacttggtcctagcagacatcagtacagtaaaacaagtgatggagagaagactctcgagcatccttctcagaacagagatacatggctcaaggctgagtcttaaatttctcagtagtaagggcaaggactgttatttcaaaaccagtattacaataacaaacaaggaacaacagattttagactcaaagggatcatttggaaagtaacttaaatacatttggtaagtaaggaaaaactaagtaaatgagtcaacagcttcaaatctataccatgactgcctacaatgacatgcccttgaaactaccacccactatttctaattagtaatattactaattgtcatagagttttgagatctatagactacataaactgtcttttcatgtagagtttatactattttaaccacagaattaccaatctaagttccagtctcattcctacatcacttacatgctatcttaagccagcactataaactatgcagtagacagtaccattcaagtggctgagtacacaatggttaaagaaaatgactttaaaacataagcatgaagcatttttagttccacatacttaaaaacctccaaaatgaatgagttataagttgttggtttttttattctattttatttgggggggtgggtgtggacgagatagggtatcatgtccctctggctgacctgaaacttgctatttagatcaggcttacctcaaactcagagatctgcctgcttctgcctcccaagtgctaggatctacagcatatgctaccacaccttacaatcataacaatcttagtgggaaggtcattattcaccaaaggattgcaaagtttatgggaatagcacttaccagtctgtagaggcccatcggtctacggcatgcagccctgtttttatgttctgtaacatttctccatccatctctgaagactgggcaatactcagaatctgactgactactgaggattctctgagaatcaggctgatgacaacacaccaatccagacatcctgcttccatgaaaatgtgcagcaaataactatatacaaagcaacaacagaatgatttgtatgaaaaagatctgctgatacacaacaggcagtatgtactaaaaagcagctccgatttctaccagcacacagaagtctggctaggctttttgtattttcaacattctgagaaactcaccgaagctggacttgagacttatgagggcctttactcgccagctccatggagatgtgctccagctcagactgagtcaaactgagggtggagaaattttcatccaccattgtccagtcaccatccaccatggagctgctttcagtcaagtctgtggcggaaccaatgctgcattcatcacctgatgaagaaatttcagaagttataaatgagcttttcatttcataaatatttctctgtcattataaatatcagttatttccaaaatgctgatttcttcaagatttcaaaatgagaacattcaatctagtgctaaaacagccattatatatgtatgtatgtatgtatgtatgtatgtatgtatgtatatgtatatatatatacacacatatatatattttttttgcaaattttttatttgaattagatacaagattgttttacatgacaatcccagttccctctccctcctgtcctcccctaccaacccccaactaaaactctacctatcacatatcctttctgctccccctggatggtgtggccttccataggggaacaagatatattttaagagctagcagagcaataaaaagaaattatatgccttaaagttggaaaacactctaattttataattaaaagtaatagcagttacaagccttcacctatcacagacgttttactaacaatgatgacaaattggtagcctaatactaggcaaatacctggccattaagaaaacaggaaatgccaggcagtggtggcgcatgcctttaatcccagcacttaggaggagagacaggtggatctctatgagttcgaggccagcttggtttacagactgagttccaagtcaagctccaaagctacagaaaaaaaacctgtctcgaaaaacaaacaaacaaaaaacaaaaaaagaaaacaggaaaaattaatctggcttgcagagcagatctgtagtctcaactacttgggtagctgagacaggaggaacttaagggcagcatggaaaacttaatgagacccagttctcaagatttaaaatataataaaaaacaaagccaaaagaatagagaggagggcttaaggaatagttcagtgatacatgcttgctcagcatgtaggcggtcctaggttcagtcccaagtattggctatcccctcctccacacacaaacacacaaagcacaattattattgaagctcttatattttataaccccatagaaacacaaattacttcaaaacctcttctgcttgtagtttaaccagtactgtacagcagaaattggcataatgttttgtaaaatggtcacataataaatatttcaggctttgaaagctaagagataaaataaaaattatatataacaaaaatttttcacaaactttactcatgaaataaaaactagtgattgatgtacattcttatgacaaaagtctacttattctaaacaacagaattccttatatgatgacatttacctggaattcaaatatagttatttccttatcaaaattagtagcagaggctcagcaaggtggctcagagagtaaaggcacttgctaccagatgatataagcctgacagacaaccagtgtttgttatcagaaacccacaaaaagatgtagagaattacacaaagttgtcctctgacttccacatgtgtattctcccacacacaccacaataaatataaatttaaaaacttgattataaagatttacttagtgccgacctgtatttcatatatctaaaataaatatggtaaaacattgttaaagccaatttgtccttatcgacctctgtagacagatgtttaatggctaattcttcaggatattgaaagaagcatgatgctgtatcttgaaaatgctatggcacatgatcttttcgcaagcaaaactcaagaagggctacaacttgttcctttattagatatatacctttattagataatggcgacaggaaagcatcttgcatttgtgggccaggggatgagactgtgtctgtgtcacgatgggtgggaccaatgttgctaagccagctctgactccgttggatgttagagatgccagcatccatctcagaggttaggaaagggtcagccgactgagactttaacagctgctctcccactgcaaggtaagtccagaagccaaagaggtgtagtgtcattcccaatattatcagttcaaagccaatcaccatcatatacaatatcatttcttcaaaagtagggatgtgaaattatggaagagattacctctgagccatcttatgtctcttactgtactaggccacactttactctcttgatccaaatgatttgccttggtttttaaaataacccaaactttccaaacaccatgataaaaaggttttgtttaagtaatcgaaaaaatatctgattttacaaacttttttcttttactcaaacatggtttcactttttcctctccatgttcagaaaatggcacaagtgtcaaagacaatttatcacctgggatgagttctgtcagttaacatagctgagcttatttgaggttcatgactaactcattctagactctttgctgcaataaggtaaatataggagcttatacatttagttttcaacatgttcataatttaataatggttagatttgtgagttaaacttcaagcccaaaagacttaagagataagcttctacttgatacatacgtttggtcaaatagtagatattctaacgaatgtataaaaaagttggcttaaattcggaatgaaaagagttccttgaatgtctatcaatggtaacatgtctaaatatctaaaataaaattgttgcaaaactgccagaagtccatattacctgttcggcacttcccatttttgaaaggggaactgatagaagaggccgggataatgggaagtggccacaggaaatccttgtgaagtctcttcagggctactacaaagttgtctacacgggcagctcgggtacgctctttgcaaagccagctgattagttcaaagcctagctgggctgcaaagcagccaaggtcctttaaccgcacatcttctaagaggcgccgagcatgtctccacagcatcatgtcaatgtacatattctcagcacagtcactgtctttgctccatctgttaagagacagaagcagctaaagaacaacttactgaagaactaactccatacactttcaggtagcattgattaagttggaaaggaagcaagagatccaatatctaattgtgcctggacaggaagaaaaagcttcagggtttctccatctcataccataatctgttaaacacaaggcacagttaccactgtttttttgttttgttttttttttaattttgagacagggtctttctatggagtcctggaattcactatacagtcctgcctctgcccggcaagtgctggaactaaaggtatacaccactatgacagacacaaagttatctcatatgaccagtttgtggaattgaatatatggaataaaaataaataggagacaaagaagccagaccaggaagaggtggtgtgtagttgaaggggggaaaagaatagcaaacaaacaatgcatttggaaatactaatgaaaaagggaaaaacataaaagaaaacctctctacttgagttatatagacacatgaaaacaaaacttataaaaattaatgactagcaaatatagtttatcatctctcatagatatgagtacctgtgtagccagtttggtaattgagtagtgggctcaaagtgataagcagggcattgtggagatattttgtttatgatctaacaaataaagcttgcctgaggatcagagcacagaactagccacactaattagccatagaagccaggtagtggtggcacacacctttaaccccagcacttgggaggcagatggatggagggatctttgtgagttcaaggccaccctgggctacacaacagcacttgggatcatatgcctttaatcctagcattagggaggtggacacaggagtgatatggctggtgggagagaggaatataaggcgggaggagaaaagagagagatactgtctgatgattcacagagatggatcagtttaggcagtcagtctgaggcagcaatgcagtctgaggacaggattgcccctttggtctgagcattggtagaggtgagaactctccagtggctggctgctttgctcctctgatccttcagctttcacccccctgatagttgactctcataccaattagaattcctgctagaggacacaagcagtagagagcctagcatcagaagcaggacttctcagatttaaaattcagtccgttttcccttagtcgtgtgaacataatcattcataagtatttttctgagcatctatttttcatctgcacagtaagtaacaaccccacagttttttaaggattaagacctaaacatgcaaatgcttagaacagtgtattaaccaaatttaaattgagtgtggctggcaattgtagctattcctccatggctatgttttacagtgtgtttgtattgggggaggagtgttaatgatcagtgacaggataaaaagtaaaataccataacaaaacatgttaacttttgatatgtgtccagaattgtagtaaaaatataaagaatataaagaagagccaagaagcaatgcaaggacttcacaagtcagaggaaatcccaaccatctgtcactattgctgtgagtccacagccacactgccagagacctttctccatcatgaaaggatgtatgtagtctttggttctcagaatgtaccagtccttcagctctcccaatacctaaccttttgttctgctactctgtcatcagaactaatttatgttaattacatttagaacaagtacatctagatctactttagtacaaaggcataaaacttacacagaacaggagtgaacttaacaggaaagagaaagaaaaagggaagtcttctctcggacttttgcaaatgaaaaaaaattgcaactgaattaaatattcttttaagacttaattatacaaatgccttgaaatgcaatgtgacagatgctctgaaaacagtaactgctctttattcttttacctttttccagaaggaccagatggcatacttagtgttttctgtaagctgaatttaccaggaggaacattttcagctgactgggataaactgatgctccgattcctgaagaactcaaatccaccacttgaactgggttcctgtggttacacacagcatgcagtaagtagttttagccaaagatgccctgtgggtgtatgccctagagaagctgtatgattctgtaactaacctgagtcgtaggtgtggatggaggggtctcagattctccagaaccaatggctttaagaaaacgaatcatgtgtcgacacaggtcccatttgccttgctccagagctgtgttgaacagaagggtggcatgctgcctacttactgcagggacttccatattctataaaaaacgaccaaggaagacaacaatccatttatatgatacaatttgggaagacacagtaattctttcttgacatttcctcagcccaagaaattagctggctgggggcaatttaatagtaagattaaaaggagcatttaaaagtgccataacgggaaaagagaagcagtcactctgctagtatagttcacattatggttcattctgttgttacgtcagatgacaatacacaccttacattcatcacggctttctttctctctgactgtaaaaagttacatcattcccatcttacaggataaggagacaaagttatctaaaatgtttactgtcaatagaacagcaagatatatctagtattgcctgactctaaaacacttggtctgtctcctgtagtgttttctgaagacctgacaaatttttttgctttgagcagaatcaggcagcactggaagacactgggtgtttccagcacttccttcacaacctagcaccttcctgctttcatggaaagctgcccaacaggctgagctagttagagcctctttcccaccaaccccagcaacataggcagttggcaggaggaaggtaccaactccacagctggggagaacaagggtcagcagaaggaaaacacaggcacactaactttcttctttatgatgatgttgtaattttaaaaagcagctccagccagacagaaagacaccatgggacagcgttcaagtggagaggttttttattaaggggaaaaaaaaaaagggatagtaaaaagggaagcatgggggagacctgcctaggggacaagagcagttggagagacggaaagggggcggagacagagaggagagaaagagagatgggaggtgggcagggcccttttaaaagggaacacagtgaatatcacaggtggtgctccctgaggcagcagctgagggcactccaaaaacaggtcaatacaaatgcctaaatactaacaattaggactaactagtcaaatgaagcttcaggccacaagtctctgcctgattgtctcctctggtttcagttagttgtcatgaagcaaatatgttaagaaatttgcttcagtctgagattctaactgggtttatgattagctttttgtataaatgaaagaactttagtatagcctttgaaattcatatcacacagtagtaacaaactttctagcccttttatcaaatatataatgaaacaaattttctggggtctcattattgtagaaaaatgtgttatgtatgttattattgtggcagccctgagccttccagctgtacccagaaaggctaaggttagatgtcgcattaaagttatttattttccggggtctaattattttataaaaatgtgttacacagattattattgtggcagccctgggccttcccagctgtctacagaaaggctgagagtggatgctgcattaaagttattcagaatcctgtcaacaacttcatactgtaaggaaaaaaaatctattactgtgggtaatgaacacaatcatttccacagtaccattttttcactgttaatgtttcttacattttattagtctaatgtagtatttttaatggaacatgtacatcatatatattacatatagtaagaaaatttcagctgaggagatggctcagttggcactttcttactctgcaagcctgatgacatgaattcaaaatccatgtaaaaaagcctgacacagaagcgcattcctctgttgtctcgtggggcccctactaacatgggaggtggagacagagaatccacagaagtacaaaacccagttctcctggcttatgcagtagtggaaagctggacagacactgcctcaaagcaaggctgaaggcaagggtcaacactagagagtcctctgacttccacatgcacaccaaagcatgtgtatacctgaatgtatgcaaatgcgcacgcttatgcacacacacacaccccctttacaccttcagtcttatttaaaattatattctgaaatcattaatctgttttaggcctatttaggcataaacagccaaaaatacttttgtaatgtcacttttataacattcaaggaaatctgtagtcacttggcaagcttcagctcttcaaaatgaaagctatacataatagagaaatatgaccaattccataaacagtattatcacaggacaaaccttcctttctaaaatcaagatcagtaattcttattcctttataaggagaactgttacctgtaagataataagataagaggcagctgtgtccaaatcctgagccatcaaacattcctcaaataagtccttggggtttccaacagctgcaaaaaggtaattccacagagcatattcagtcttcctggcacaatgcacaactgtctgaaggaaaagggggaactcggtgataaacttggccacggtgggaagcaggggatcgggaatgggctcccgtgaggtagcttcttcttccagcacttcatggagcatgagctccagcacatgagggaagtaaggtaatgcagagcaggactgagccaggagcagggcttgctctccaaggttcctgaccagaagctgacggaggatatggtggaggtagatctgagaggttctctccacaacacagaaagggaagagcacctccagctgctcccgagcactgttgcgtgtatacaaagaatcatagagtaaagtgtcattgacagcaccaaggaccaatgcatcttcaaacagcacggccagggggtagatgttgatatggaaaggcagcatgatgcgctgggacaagaaagagtggggcttgcggtggtccctaggaaagagggggagccacaccttcatccccgcaccaccacagctcagccagagggcctccagaaggtgacgcttttgcttatttgctcgacaggtagtccagacattttccactgactgggctagtacaaccggaggacaaaacggcagctgaaggaagagacacaagaattgttggattttggttttcctattaaacatgtaggttcaagttcataggtactagctttgtagcctttcagaatttttgttttttttaaagtaaggacatttacttagaatttagagataacagcagtaatctttcaaaggatatgcactgatatctaaaaaatataaccctatggataccaatctctatctttattttccaatagataaatgagatctacaaatatgtgcctaagcagtgacatctggaaaatgagacactttttattttaggacttgcccttcagtattatctcttcttagctaagtttaagatgaattttatttattttcttagcttctaataacaacacactgctctccccttaaatttctctattcataaagcctaacctcctaacttctcagggtttgaaatgccttaaacttttactcacgagtttcctttggttagggttactgtctttttcccggatttgagggcctgacctgtccctctgcatcatgatgagctgtccagcaaggttgagcattatgctctctgcatcacgagcctgaaatgtcagaaagagaaactcataaatactaataaatagacatgttcttggcattccttttccacctagtaaattgtacaggttaaacaagcaacaatagttcctggggttgctctatgtacagccactttgctaggctctgtggatacaagtttcctggttatgatggaacaaagcataacattgtgcagttagtgaccaatgagttcagaacagagttattctggaaaaactaagagaactccagaagtccataaaaaattcaaaagtcatttcagtgatctagctggcatcactagagaaggtttaaaagggtctatagagacctggaaggtcaggacgtcacaggtagtatagaaaaggctggtattctaagttaagcatgaaatgtaaaggaaaacatggagctaggaaaggacagttccattggaaaaagtgagaataatctcctagatggatggcaacagatcttcaaggaaagcgtgggaagtcaggcaacagggcagcaggacataaactaccacctgggactctcaaacaaaagaatccttaaaaaaatttaaaaaaacccaaaaaccaaaaacaacctagtcagtcaggttgaatgactatattgactttaggaatgaggaactagtctgccactttactatggacatttcaatcaaatgctagagtaaaaagcctacaatcactactgttaaactccaccaccctgcttagataagcacacagagagtttgagaaacactgctttaaatcaaatagcagataaatcaagtattttcatatataaaggggaagattattttgccttaaaaagtgaacagaatttactgctgacttaggcatgaaaacaaaaaaacaacaaaacaaaacaaaacaaaaccaaaacaaacaaacaaaaaaccaaaaacagaaaaagcatgtctgaaccaaagatggcttcaaggtacaaaatctaagtgaggtattggaagaattgaggttggtgctgtaagagtatttcctgcttacagggacctgaattctattcccagtacccatgttggctgctcacaatggcctataactccagttccagagagtcaattccctcttctgaattcctccagtaccttcactcacatgtaaatacaggtagacacacacacataattacaaatagtaaatctttgaaaagttgagaacatcagcaaggaggaacagttaggaatatgttttccccactcacccacattaaactggaaagaaacttaagattttcaatagaaatgtatgtgccaactgagtagagatgaacatgttaacataagcattatgctaaggctggaaagctgacagatgaattttcatagtagatacaaggaaagggcctgggatgtcacctgaactttcccagaacaaaaatagggaagcctaaggctgctcaagctaaagaaaactcaggaagagaggtgctactctgctgttgtactgtgtctcagactttgatacctgcttaattgatcagtttacgctttcggtattatttagggctcattcagaggaagtaaaaatcagctaccctatgcaatttagctttataatacttaatgttcttgcttgtatatgaactggcacactgcagacgcagcccaaaattgtccagaatgtgcggggggggggggggggagggaggacaacattcaacttggaatgcctttcataaaaaatgaggatcttctaatcacatgtaggaatgagactgaaaacagaatttaaaagcttctgggaaccataagagtcagacactcagataatagataaatatagctgagtggcagggaaaaggaaaacaaataggcacacatgaattaagacactggctatctgagcattcacatgtggacgaagtccacaaacatttccaaaaaccttgaaaggacttactagaatttaccataatatgactaatttttcataatgggccttatgcatgccaggtaaatcctctaccactagatcgtatatctagatcttcacttaattttaagataatagatttcaccactatgttatacatatttcttcagaagaatatacatgtcttttcttcaaaaagtagctattattattaaaatcttaatatttttattgacattgttgtgattataataatactctgggacaacttcacgagttttcagaaaaacaagagctactgtatgctcaaaattctgagtttggaagagtcaaaacccgttcttgccctacaagctccctggcaaacaatcctgcaaggatctggagtttatcagggagctcacatactctcctgagaggccctggctgttaatcagcctcatttgtttctaaaggatgataataattaaagcaagacttgccttgtagtgctgtggcctcaggctaaatcttattatattccaactttttaatttgctcttcactaagttaagcatctctctaggacgccctcttaaatggttgtaccccttactaatgacactactgatcaccactatgtctgccttatagaaagactttccctctctaaatcttgtcaagttattttaaagcaaaacactatgccatctattctctgaaacctaatatccaatcctaaaatttataggcatttaccttaaaactacaatgttaataaaacaataatttttttggtttctctctctcaaatcatatttatccttaattactacaatagactttttaatagctgatttcaatgagggtacaaataagcttaaaggcttgtttctgtagcatagcaatatggtagtttgtgtgaggatggcccccacagtctcctctatttgaatgctgaatcccatcggtaactctgtttgggaaggattcagaggtgtggccttattagatgagttgtgtcactggggacaggctttacggtctctctttctctctctcctgtttgtagatcaagatgagagctcttggttgttgtccagcagccttcagccttcactcctccatcattgactcaaatacactagaactctaatttcagttaaacccttgtaaattgcattggtcatggtgtcttatcgcaccaatagaaaagcaatcagcagtcagacagcagtcatcacactttcttcataacagcagttacggacactgcattgaagggttcactttatagctaacctatggactgatagtcctctcccttgtggtgtaactagactaattctttatctctacaatttctgagaatggaagatgattctggacacttattcaatttaggttcaatgtttttggtaaaaagtcatgatatgaacttcctattataccaccttaggaagcagacaacatttgtttcttccctacttttagttatagtctgatgactaaggcttgggtgtgaggtaaggtttcaataacaatcactgctgaatcagtttcttaagacatgaaatggtgactctttaattctcacatttccttaaaatcttgtagtgggaactgtgaaactggactagctggttactaccacagaccttacagatcgaatgagagctgtgttgtttaagagggagactggaatagttaacacatacagaacaagtatgacacagttggtgacagggacgtgggactaagcagatgaaatgttttaaacaaaagtatgagagagacaatgccttacatattttagagggtctcatgtggatatttgctcttattatttattattccacataatagagaaatgagtaggttgttcccaataagagttcttataaataactgataacaatttcagctgcagtggaaagaggccctctaataaagcagttaaactctccataattttatgagaatgctgaagtttaatgtaagtacctagatgagaagaaaaagatgaactgagcagataagaggtaacaaatctacatattaagaatttcccagttgacaaagtttggaaactgctgggatagggaaatgactacaacccaggtgttgggagcatcactgtctacctggttacttcacccaccaactatgggattctagtttctcttccctcctaactgccatgagtcctctacatcctaaattcattttcttctttccatctccccttcccttccctatgctcaggccactgacactattcaatacaatcagtagtgtcctcctaatactacttctttatgaagtagtggactacttcataaagttccacgttccttttcctcggtagagaataaaaacactaagatttgaaataccaatattctccctaagactgaccttctctcacagcctaggctttagtcactaatactctttatctgtctgacacatcacactgtttgtctgtaaacctttgcatgactgcctgaatttcctcttctttgcttagaacactcctgcctctgctcttggcttccgttcaaatgcaaaactcctctgattgactatacaggctgtttccatgtttcagagtagcttttacatgtgtaattacttgtttaaagttgaccagaaactggtctgcttggcttgccactaaaactcagcatattcatgcaaggtacaatgtagacacttagcatgaatttactgaacaaattaacaggccctaatattggcctaaagactgaaaaataaactcctaagagttctgaaaatgtacaggtacctgctgtggcattttcaaggtgattccattctctgtactcactgacgtcagtgtgacagacactaccaggaaaggatgaggaatgtatcgtgacatggagacctcctgaagaacttgaacgctagccgtagtattcgaactgtaaagacaaaaaaagttcatagctcaacaatgttcacttacttttttctcctttcagcctctatattacagcacattttatgtttatagcagatccaaatatcttctccgttttgtcctcttctccctaaatacccttctgacaggattattaatgttgaggaacccaaggaacatatgcaggaataagacaagaaaggcagaaaaatgctggaaagcagtaaaaacaaaaccacaatacaaaatacgcccctgaaaccagtagtgtggaagaagctatacgaacagaaataccttgggagtcgggtggtgttgggcagggacaattgtttggttgcgaaatgacaaaagtttaactattgaaataggaatgtcttcattttttatgtctgtattactaacatatcacagtacttcagcaaatatataaaccatgtccttattaaacaaacatacttctaaggacaaaagaaaatccaagatgctgcatgctgactagacaccatcaatgtaattcagcaggatttcagcttctgtgctgtggactacaacatcactgcagcagggactcagtgagcttcccaagggtgcttcctccactttctttaagtgttcgggaagcaggagagttattagccacttacttgtaaattgtgaaaaagtatctaggatttatctcagctaaaattttacacacccccttgccaccaccaataacacaggaagacaagttcaagcagtcagcacaggttcttccttgtttcttcacagctactacataaacatcaccaaaactctttataatgagcaaactacgaggatggagaaaggtttttagagaataatagaagaaacataaacaggagcaaaagtgactcacccatgttaagacttacccatcggatttcctttcaatactgtaaaggcatattgaacaatctgctctgaacacaaccaccatgtccctgaagacactcagcagtaatgtttccgctggtgccttggtgacatgagcaaatgcattgtccagatttgatgttcgtaggtagattctgagctaaagggaaaaaaagaaagaaaaaaaaagaaatatataaaaataaaagatggttatcaagaatgtttggtatcagtcatatttttatctatagaccaccccctacctccaattcactttaaagtagtaggagttaaaagaattattaatgatttaacaaaaagtgaataatatttttatttcggctatctagtcctgtataaataactagggataatatcatcaagagtaaaggtaacattatgagaccatgtttcagatcttgtgtattcaaacttaccaatgggactaccatttcctcaaaatcaccatataaatcaataaattaataaagctacccttaagaacagttgttcttaatctattttttgcttttaatgttttacatcaatctttatagattatctactagctaaaaggttatcctttttaagattacttcctttttgagacaggtttaatatttagctcagaatggacctgaactcatagtcctcctgtctcagctttttaggtgctatgatataaaaggctatcttacaaattcaaattgtcaccttaaaaagaacataaataacctaaaacagtaattccactattgaatcatgctaaatcactggaataaactgttcagtttttaatggactattgtctacctaaaattaaaacctgcttagctccaaaattaaaaatctattatttcttagggggaaaaaagttacctcttcttgacggtcacttaagttataacatgcaagaaccataaagtcattccaccaggctaatccaccagtcacaatcatattttgctccttaaaagaaaatattaagatatatttaccttaattatgttacccaaaatttcaataaagtaacaaaatactcttagaaagctcagattatttctgattcattctctcttgcctatttctccagagcctttattaataatgcacaatatcctatctttaaaaaaatattcctataaagaaacacctatgtaattcaaaatacctcaataccagatagcatcattaatcttacatctaaaacaacttgatttaaattctggctttattctttgagtgcctggatcccaatcttttagcaaatggtagtattagtgtcctaactgggttgataataacacaaaataaaagcactttaaagtatctgatacacaaaagacacctactttaattttctttctttcttcccatttgactctcatcatatctagttcattccccactctgctatacacagaatgatctctaactttgtagacatttaaaatgtctcaccacatctgatacctcaatcttaaagattatattaaaccctattctaaattactattattgttacttatcttttttcttcttttcacatctatgtgctgtgaagtgttatgtatgtacacgtattgaggtgtgtatgagtgtgtgtgtgtgtgtgtgcatgtgctgtcaagtgttatgtacgtacacgtattaaggtgtgtgtgtgtgtgtgtgtgtgtgtgtgtgtgtgtgtgtgcatatggagcagggtttgatgtctggaatactctttgatgattcttctaccttattctttgagttagcatctctcaatcaaagccagagctggctggtatggctggtttctccaggctgcttgttccagggattcccacatctttacctcccagtgatggcattacaggtgatttgccatttctgcccaatatctaaatggcctctgggatttgaactgaggtcccccttacttgaacagaaaccacaaatggtagagtcatctcccagcacttgtcaatgatcttaacaaaaaaggaaaagccaactatctcaattcaggatcttttatgaaatcaagtattttatcaaaactgacttattggaaattatcaaatgtcaagtctctctccccacttctctgctcctcccagaaccagtgaatataggaagtgctttacagttgaactatagctccagcctcactatcagtttctttttttatgctttgtatcttgaaatgtatttttagtttaaaaaaaaaaaaaaaaagactaacctgagtaatgtttccaaaaagtttccattttttggtgagcaaagagtaatgtgcaaacccaaacttgccagccacagcgatattctgtccaagttcatcaatagctgaaaactgtttaaaaagaaaaattaaaacatctttcctacaaatatatacactttactagatacaaagtacttaataaaatataaggtgaagagactactaataaatgtttgttaagtgatttaaatgtaaaatgctatatgagaaactcaaatattgatagttagatctgataaaatacaccaagcattaaaatttcactcttataaatctataagggctcaactcccagaatgactaccacaacaccaataaaataacaactcacccgtataggccaattgctttctagataggtgctggaaatctatagaaaataacatattagtttggtgagacgtatgaaatatatttcaatttacagcactaacttagcacagcacgagattcagcttcctgcataatgtttaaggtgccaagtagtggctttagtagcagagcccttggaattgagcacttgtttatgagtcaatatttcacatgctccatcttaattatttcaaacttttagacaccacatttcctccctccaccacagcattgcttgtttcaaatagtaatacaaactaacaaagaagcatgtgtaatggtagccacaaactgcagacaacagtttctgtctgctgatatagaccaccccaaagcaatgacagtttcagcaagagttgctgtttgtactgaaaatcttcattactctgttgtgataaaaaagcaatgcatataaaatcaatcattataagaataagcaaaaattctgttgcttgagaatagcaactggattatttttttatcctacttcttaagatgtacctacaaacctgtatggatatgtttaaactactatttttccattaggctgttcaactttgtttatcaacaagaacccttatataatggagatgtaagtctcgttctgaagcatcaaaggtaaacacagcctcccatgatatctagcgtacacctttgttcacggtgtcactttatcagtcctatgatactttcaaactttgagaaaattctgtgggttattaatgtggagtaagttttagcttcacagactcttatgtctcctagtttactaattagctttcatgagcagttgaaggaagtggagtgtgaattaacagaaaaacagaatgacagaagagtcttctatcctgaaataagaaaagctttaatttattcaaatttgttttaatttgactcaagaaaactgtatacatatccaaaaacaaatccaaatcagaaagctatgtaaagtataataaaattgtgtaaaaataaaagagaatcaagtaatagcaatatacccaaagcacttttatctctctagttagctagctcataaagggttagagtagtcaacttaaaaatacaattaaattaatagctttcaattactcaaaaaaggatgtaacaggtggaccagagtaagtagcacattatcatgacactgagtaaaataaatacaaatcaaagaaccctacacttcccaatctttgatgtttcactaattcctgtgaaatttgatgtgtgaggtagcacatgactgcaaaagtgattccaacataaaggctcagtaaaagcttatctaatgtatacccctacaagaaaaaacaaaacaaaacaaaaaacaattcttttagccttcaaaagtctatgacatactacaaataataaatgatgtatcttcaaaacccaaatacaagttaaaattaatgggctttttaattttgtctgaatattttatgactagagcaaagtacacagtttctcctagtgtcaccatttttgatctatgtgtcatctgaactttgtcctatatacttaatgctatgtatagaaatagtggaacgaaagaggcagctaataaataataatcttgagtcataaagtcaggacagaggggtcatgccacatcactgggagatggtgttatggtacagagcagactctcaccgttcttaccaaagggttttctagtctctcttacatggaaactaactgctttccttctttgtttctcctaaactctctctagcctggagttgttttatcttaccagtgtgaccaaaagattaattaggtctttgtgaaatagcacatcttccatacctgataaccatagggggatgtgagcaaatcatttaaaagcaaagtagactttaaaatgcactactgacttccccaatggaatgcctgatatttacatcccacattttgttgacagataatctttcaaaatagttagagccaggttaagtataaaatcaacatccttagaacactaaataataaagaccttttagaaatcaatgcttacattttataaaacactgaacattagatggaacacagccacaaactaaaaggcttttgttttttaatttcatattgtattccagtactttgtaaatttgtaactaagaaaactaaataaaaaaaaaatacattgaaaaaggcaccgtctacattgccagttactaactttgcttctaacaagtgtatatgcatttggcttggctagatacatataactaacaaaagcttctaatctggaagttaagtttgaaggtttgaacaaacaagaaaatagttcagtattacagatgatgagtagatagcacagaattagctagagcttattggatgaacttatacagtaaacacataaatagaaatcacacaaacaaatcaactttaatggagaatgtggtcttaacctacaagaaaggataagtgggaaggggaatgaaaccatgcccctagtttctccaaggagcccacatgactggctaagaagcttagacagcaaagctttagtactatataaacactaattagaaagatcactgttactctgaattcaactgctagactccagtgttaagtaagcaagcaaagagcagggcaactctttaaaaaaaaaaaaaaaaaaaaaaaagccacaaggggaaattgtaagtttcagtacagagtcaacagtacttcaatgagtcaacactcagtgcctagatttttgaagtacactgaattttttctttaatgtagacagtcttaaggctaggttggccagtacacctttgtgtgatgctggatgagttgggttaacctactgagcttcagtttcctcgtgtacaaatccaggttggctatatgacctctaaggttcttccagctctaaaaattctatgaaatttgaaattgaaattctactacaatttaaatgtcttgggagcacaactgtggcatttttatttacatttttattagtgtttattattgtttctttctcattagggtttatgaggtctccaaagaagagaaagttctgacatttctaccttatttttctgtgaaccacttgcttacccttatgccaaataaattaatcatttaacaaaggttttatcaaagctattttatctttatgtaaaattaaagaacagagatgggtaaggaaatgaaaagacctaggcaaacccacactaaaagctcatctgtagatacgatggcagtgagctgtcagatgaccaagccctgctgctacctgcagtcctggagttagtgctatgacttctctagggggtgcttcatggacagctaagaatcactgaatttttgagctggaaggaaattcaattttgttattgcctgatggattgttttagttccagacctaccttctttgatcctctgctctacttggctctctggtaacacagacctggctaggcagaactggcattgatgctaggtcagtgtagaatgaatagttgaaagtatggggaaatgaaaatagcagagaaatggctataggagagaagggagcagtggaaaattttagtcaaggaagtagctgatgcagttttatattttaaaaaatgttattattaaatggtatgtacattgtttgatccatgaatttatgtatgttcaatacattttcttttagtgcatactgtaagtcaatgtaggagctattcctcctttaacccttcagagtgaccattatcctgtctctcattatcttcattcaaaaacaactgaaaataacatgagagctgaagtaaactagtgagatagaagcagagagaaggcaaagaatcatgggaatagaaactgattaaaagaagctagtgtggtagtgtatgtgtacagtcccagcattccggaggctgggacaagagaactgtgaattccagaccaattacacagtaaggtcctatctcaaaaggaaagaaaataaaaaaagaaactgactaaaagaaactaacccaagaatagggtctgctacatttcagaatcaaaaggagaaagaaaatatttaggactttgaaactatacatagaaatttctttaaagaaatttcagtttacttactgcaccaaattaattttaattggaattaatccatatcaaatgtcaatctgtcaaaattgctataagaacctgctaacttaaatgtggtatcaggatgaacccgtaatttgggaaaaccaaataataataaaattataaacaataagtttctcaaatgttgagaaatttgtaatctggatccactgttaggtgagtaactactgaaactataaagtcagctgtactgggtactagtcaaatcactgctttccatgcaatggacacactttaggctatgcaaatccgcagagccagattaagcaaaacagaggcttgaggtaaaataaaagtatcttctcggaggggaaaagaaataaacttctagttcttgacactattaatggtgaggatatactctgtatcaaaaggaaagaaaaaaaaggcaaggaaaaaacataaaaaagcattgaaagagatatagcaatggaaataaaaactggttccaagtgacacttcaccaatgaatgagtcactagtagtcggtaaatgaacacggacctgtacaacatgccaatgccgatgtccaagtaaagtgcttaatccctgagactccagacctccatctgcaaaagggctcttctcccgagagggcatatgatcagtgtgtgccaaagaactcttgggattttgggtttgtgaggcttctccacagttcaagtacaagcgatcttctccctgaagcaacacctgttcttggttactctggacaggcaaaaggggaaaaaatactcagcattaggtagggacaattaaataacattctgttttagttttatttttaaacatgtactacatctcagtatggattttcttttctttttttttttttggattttcttcagatgatcaaatctacataactatctcatatatatttagataagagtatatttcagtggcttttattgtaagtgtttttgtacagtgtgttttgtcaatgccttgccaattttttgcaggtttacaaacatttgaacagtacggtgatactctgagaatcacacctgaaaaagtatatgtaagtatacattgtttacagttgacagtccaagtttctatgggtattcagacaaatgcaacagcaaggtctttggtgaactgaaaatgttactctggctaggcagactagcctgcttgctctggaatccccactctacctccttcctgctgggaccacagacaggctaccatactcacctgccttttacatagataagttctggggattcaaaatccatttacccactcactgagccatctctccagccccagagggtgctttaaagtgatctggaatggggagggggtaggaaatatacttgcttttatttttctgggaatccttaattgtcaactatagtatagaattctgagatctcggttcttttcacattaatttttaatgtgttgtaatttaaataacttgttacagcaaatatcttcaaaaagccttcaagctttttgaagccagtaccttcaaaataggtactgagatgtatactcacagcatataactgtagcacattaaaatatatgatcatattatattaatcagagaaataaaatgggaagtttatattgtactttgtaatatttactataaatattacaaaatatctatattgtaatgaggcaatgctttccaaaagagttctcagacatattttcttcaaagagttccttaaaatttacagctgaacgagtaagaggaacattgctttttatatttttgtgtcagatatgaccacagctctggagtcctaaactactctttgttttaaagcctttatttcacatatgaaaacagaatgttttgttttggtttgggcctgtgatcctcttgcttcagcctcctatgcactggaattacaagtgtgtgccattatacctggcctcagaatttgtgtgtatttgtgtgtgtgtgtgtgtgtgtgtgtgtgtgtgtgtgtgtgtgtgtgtgtgtgtttgtgtgtgtgtgtcagagagagacagagagattgagattgtatgtgtatgtgtatgtgtatgtgtatgtgtggaagtcaagtgaagatcttcctcacttactctccaccttacgttttgagacagggtctgtcactgaacctggaggctgctgactcctgtttccaccctcctagagtgtcctctggaaaccacaagtgcacacggtcatgttcaacctttaccatgggtgtggggggtcaaactcatatcctcaagcatgtgagtgaagcaaacactttaccaattaagctatccgcctaacaacctacaatgttctttgaggttttttgtttgtttgctttaaatcctatggagcctctagcaatatttataagtagtatctaaatggaacacattttggataatctttctcagataaagactaaattattcacttggcagtaatggtgcacccctttaatttcaactcttgggaggaagaggcaggcagatctcagtgagtttgaggccagcctgatctataaattgagttccaggacagccacagctgcacacagagaaaccctgtctcagaaaacttaaaaaaaaaaaaaaaaaaaaaagactaaattatttttctttcaagttgcttgtggtattattttcttttaagaataaaacaaaaaaaaattccaaaacatgttcagaaataagattttggcattaattttataaaaatatacaaatcacaggaaacatacaacaaaagtacagttaaatttaggaatatatccaaatctgtgggtcatagaaaagggtctaaaattctgctaagagacactacaacaaaacaaaacaaaaatgcccacagctttaattacttaccatgcaggggtttacagtgagtacactcttgataaactgaaatagcaaaatgctgggctgtttaactatactcctgaggtcagactcaatctcggtgttttgagaaccaaatccactgatcacccacaaatgatagccttctgcaccccagctcttgaagaaataagagaaaaaaagtcaaagcagcaaaaagttatttttatctcccttataacttcagttaaatattgaaaacagtcaatgtatgaaataaccaatgacaccattattgtcttctgaatgctggagaaaccatgacaaataacagagacaagaatcacacccagggctcagaaaggtggcttagcaggtcaaggcgcttggtgtggaagtatgagtttgatcccccagaacccacataatggtggagagaatgaatgccatcaggttgtcctctgacatccatagagcagcatgctcacacacacaaaataattattgtaaaaaaaaaaaaatcacaaccatctagtcatctagtacaccttatctatttccagaggaaatgttctcagcttcaatttcagagttccagttctaaaaatccttctgtaacatctcaacttaatttacctgcttctcaagtagtgaagaaacatctacaatagatgtagctttgtatacagcaaagagcaccagtgttttcattccagcttgacctttttgttacactgtcttggcctatctggtttctctagatagaggtttcttcagttgtggtatacagtgaaaagatttaaatgaatttccccaagcccaatcagaattaaaatcctgtaactagattccatcatagtatttttcaacatagtaatttctaatctgtaatccaagaaaatggtgagtgaggttcagactgctgcaaattgttagaagcttaataattgtttatttcatgtgtgtatgcacaggtacacagggaagcaagaagagggctttgatatcctattgtattgctctttctttattcctttgagacagggtttctttgaatctggacctaactaaatacttggatacttagtttgtggctataataccaacctagtgaacctctgataataatggttgatacatgccattcaacggcactggctagttgtaacatgaaaaatgtaagacccagggactgatattccggttcaagcttcaagctgaacatcagaaaagcaaagcagctgggcactagctcttacctctaactctgctcagaccaaacaggtgatcctcaaactgctcctgacttcactgctcagattcactcagactgctatgctctcctcaatgtggctagaaactaaactctcagactgaatgccagctctgagaccctgttcctgtcttaagtacctcacaggagtcctgggattaaaggtgtgtgatcccaagtgctgagatcatctttgtgtgagctgtttgtgtttaggactggatatatttcatgtagctcagtgtggccttgaactaacagagatcatctacctctacctcccatgtggctggattaaagatatgtatcaccactgctgatctccatagcttgaggctggttttgctttctgaatccttgggcaagctttaataagtcataaataatatatcaccacagctggtagtttcagaaatattattatactgaaaacttacacttgtttatctatatatgaggggtgtgtgtgtgtaagccagatgatgtcatttgtcagaagctatctaccttatttttcaagacaaagtcactccaaaggcagggtaagaggattgttaggtcaaggctagcctgacctatatagtttgaggctaaatgttggttacacagcaagaaacagcatcagttttttgagacagggtttctttgtgtagccgtggctgttctagaactagctctgtaaaccaggctggcctcaaactcacagagatccacctgccttcgattcccaagtgctgggattaaaagcatgaaccactatcacctggcaaaccccatcttaaagcacacaaataaataaacttcaccaaaagtctgctgagataaaaatgctttctaattttatgttttaaatagaaagtacttaccatagaactaatcttaaggggatcttttttggtaccatcagacctataactaaaacaaaatagaaacttgattgtcttccaattacatactatgcgcataccacttagttacagtttgaaaaagaaaatcaaactgactttgcttctttaaaacagaaatacataatagtgcatgaaaatgaaatactcatgcattattacatatttttattttaaagaacagccacttttgcttttgttttttttaatagcattttttttttttttgaagtctcaaaacaatgtagcccaggctggcatcaaatttccagagatcccctgattctgcaccctgaatgctgggaataaaggtgagtgctaccaagtccagcagtcaaccttaaatcttaacatgaggtcatacacacaactgggctcaaaacaacaacaacaactgcatttccctaatgttttgttgggatcagtaagcaatttttattgaatcaactgtcagttttaggagggtgaatatttgaagaatcaacatattcgcaacaaattaaatttgaatttcacaaaatgttttggtataagaataaaatatgaatggatgaactagagatcgtgttaagtgaaatataccaaattcagacagacagattatcccatttttcctcatatgcagaatctgttcataggacacgacagtgagagggaactatgagggtagaatagtggtcctggaagtaagaagagatggggaaataagagagggcagtgggggctggggaaatatagacaaaataccgcatgagtacagtctagacttaaatacaaatacacatataacatggcatgaagaagagggagccacttggtgaaaaggagggaaaatatgagcacagtgcattggtgtgcacatgtgaaaatgtactcactaggggaatatgggcacggggcattggtgtgcacatgtgaaaatgtatgagctgtcagggaaacatcaggttatttatctaaagtttctctttattcactcacgcgaagtctcctccaagtgtacaaatcagctgggctccaaacacactccatagagaaagacctccatattcccaggttactattacagcactattgtcaggagaccatctaatcattttaacagctcctgttttgttccaaatgtctgtgaaaagatcgtgagaaaggttaaaaagattgctcagaaatacttagtactttttacacactgtacgttcaaacctgaacaagcagaccagcacaggctacttgaattctaaggtgagtcctgttcatgaagggtactgagagttaagttgaagggaccagcttcccttttggcagccataacgactgaacacgcgctctatgaccttgtcttagtcacgatgcctgcctcgtgacaaggaaacagtcagaatttagtcactagaaagtcagatgcctgccttgtgacaaggaaccaataagaagttagctggtggcacaatgctttatgaccctgggtgtgctttacggacaagcacacagaaatgatgcacaaagcatagcaaccaccctggggagggcctgtgggccataacaaccagttggccaatcaacacagggcaaaccctccaaggctggaggcacaccaatagtgagcctgtgcgtacccctagacactccccttacgctgccctgtaagatctcttgggaggccctaggagctgtcttttgctagccatccgccatggcgggtgggtgaaagaccctcgataacatggggttagctcgttaaattacaataaagcctcatgcagtttgcatcaagctctcgaatctgcctggtgattgaggtgaccgcgaatgtggcctgggaccctggatacctgagttttccgggggtctaacaaagtcactagcctttgcctgatctaacatgcagaacctcagaatgcaggtgaactgtaggaagtgaaggctggttttgccttgattagcttgaataactgtcagtgtgtaataatcttcaaagctctcagaccagcttctgtaaaatggggacaggattgcagaaacagtctccttagagaaaaatacacacaagtcttttccagagtgagcatgataaaaatgaatcctgggaacaataagtatctgtttctgtagtacatcaaatactatcctatatgattcttcacactgaagtatgatgttgaatgtcccaaaatactgggacaaagtactttcccctctgaagtcatctgtcaaactctgaaaatctattattaatggtgactcacacagcatgtgaggatcaggagataaagttcagggcttgcccacatcaggaaatctagtaaagacacccagtaatgccaagattataaaggttgcattcagagtacaaaggagaataagagaaaaactgccatgtagatgagggagggaaattttccacattttatccattacatagaactggaacaaaagtcccatggtagtccttgggcatatatcaacccagtcctcactctgagttataatttggttaattaatgtggttgaaaaaaacaaaacacttacacagagaatacaatgcaaagggttccagaacagtgtggtaacccccaagtgatctctgaaagaaatgtaacgtaacccaggtcctaaagcacccacaaacatctgtcgagaaacaactttcagtaaaaaaaaaaagaaaaaaaaatgctaagatacataaacaaacaaatcctaagaaataagacacagtagaggtagactcaaagtctttggatactaggattaatggagactgactataaaacaacctcttagttttttgtttttgttcaagacaggatatctctgtgttgccctagctgtcctggaattcactctgtagaccaggctggccttgaactcacaaagatctgcctagctcacaaccattctttttgtagctaaagaaataaaggagggccaatgagacacgttggtggcaaaaagtgattgtcatgctaagcccaagggcatgagcttgacccttataacccatggaggtggagagaagcaactctaaagttgccctttgcccttgacatgcgcgctgtgacgtgtatctctcccatcttcctcagtaataatgaaataagagaaggaaactgggagattgctcagttgataaaatgcttgctatgtaagcattaagaccttggcagacatggtgccatgtgcttgccaccccagcacctaacatacacaagagaagactatgatgaggagcagaacacacaaaggccagacaaactaaacagacatttaaaaataaaaacacagtaactaaatgtaaaaccaatgggcaagcttaagcagacagagaaatttacaaaatttgaagccagggtaaaaaatgtagaaaaaaatgcagcaagtatctaattagaggtaatgactgagaattttcctcaacagttgaaagatttgaatccccacaagtctcactttcaagcagtactgaaaaacagaaaagccatgacaggcaagcattctaccaactgagtgacatcctcaaccagtggaaatcaatttaaaaccagcaatgtagatggttatttcccagccaataagtgtacccattccattagcataaaaatgcttaaaaatcagaaaatattttctacttgtgggcactttttagaaaaatgataataagctgctatgacaaaatactcattacataggttagatccaattacttaataaacacaaatctcagcatagcctgcataaaactgcagcaatactaaacatggagtagaccaagaaagcacaacagggggactcagcaagtcttaatatgccatgtatgccaagatactgctgagatagagtccaatacctaatgccatcctcatctcttgtccatttctgctaaaaagcttaggaaaaaaccacttcaagtttgtcttgaagcctaacatagctagctataaggcacatttatggttgattaagtaagcagaagttggagtggataggtcactctgggagactttctctctgcttttctgctttaaagaaaaacatcattatataccgtttgctttcttcctgatgcaaatgcagaagttggaactcagaagctattttatgctcatgaggtgaaggtcattaaaagcttatctctggattcttgccatctgagaaaacagatcctatttaataattatagtacttttttttctattagttttggtcaaaagcatttccactgacagagtgcatttaatttagtgactagtaagattcactagggttcataaagaatgttcagttttgcccactgctatgaacccagcctttagaacactgtctaacatgcagttgttactcagtgaatatctgagagaataaattgaaaccaggtagagattacagaactgtttagacaagaaaaatagaggctaggatggagagtggttcttacagtggttaagagcactggctgctcttccagaggacctggattcaattcccagcaaccacagtacagctcacaactgtttgtaattccagttccagggaatctgataacttaacaccaataaacataaaataaagttaaataaattatatataaaaaagaaaaatagaagctgaaactaagtgagagacagaaagaaatgaaaggataaaatgatgcccaggacctctttcatgatacagaaattctcaagtcagatttttttcaatgtctcactaatatttacttagaacatgcgttatttaaagtttgtttttatatcatgttaagcatagcattaccagcacagtagtgcctcttatctgtggcttcatttttcacacttaacaattacccaagattaactgtggcccgaaaatattaaatggaaaaactcaataagtaaaaaattcaaaattcaactagacaagctgtttcaatactgtagagccttgcattcaaataacccttgtttttcttaatgaggcacaatggtggatgttagcagctctacaaggaaaagctattataacaaaagtaaaagtaaaatgaaacaaaaaactatacactgacttttctaagaacaaatctcacttgggaggcaggatggctgctataactcaaggccaacctggactaagagtttagacagtctaggctaacatgtgaaagacttgtcttaaaaaaaaaaaaaaaaaaatctcttgggctggagagatggctcagaggttaagagcaccgactgctcctccagaggtcctgagttcaattctcagcaaccacatggtggctcacaaccatccattatgagatctggtgccctcttctggtgtgcagatatacatggaagcagaatgttgtatacataataaataaatgaaatctttaaaaaaaaaatcttctcatgtgaaactgatgaaaagcaacttgtactggtttttctgtcatacttcaaattgcaaaaattctgactctagtatgtaataaatgcactattaaaatagaaaaggcattaaacctgctggtttaagatacaagaagaaaaacacagattgacatgctacaccttaaacaagcccccccccaaaaaaaaacaaattatgagtcatttcttagatattgtttgttgacatagaattgaaactaggtttacattgaaaaactaatgtgtgtatgtgtgagtgtacgtgtgtgtgtgtataaatgatagagagagtgaactgctaaatttgccaagaagaggctgccaagattcttacagagttggaacacctgagctaagagaaagggacagcagctataaaaagtcttctggaataagagatgaaatatagtcacagatcacctcgtactgtgatacttgagggcttactgctaaaatcaggtgtagtagacagaggcaagaacccacatactccaaaatattaaaaaaaattttgagagaaatgccacatttaggtacagttgttctattattgcttatttttaagtttttggttattttaactatgttgtttataaaacacggtgtgacagttcaatacatgcactgttgataaccaaataaaaggggtccatcttcatcaccagcttgactagacttaaaatcaccatgagaacacacctctgggtatatgtgagggtgtttctagaaaggactccttgaggagaatgggcagcaccatcttatcagctggaggcccagactgaaaaaaatgaggcactaagttgaacagcagaactcccttctttctgcttcctgacaacagtcacacagtcacacatgctgcctcaagtccctgtcaccatgctctcccctcaggacaggctacatcccttacactataagccaaaataaacgcttcctttcttttttagaagtactttatgtgcatggatgttttgcctttatgcagtggaccactttcatgtctgatgcctgtagaagccagaagaaagtgtttttcttctggaactgaaattacagatggttgtaagctaccacgtgggtgatgggaatcaaacatagttctctggaagagctgtcagtgttcttaactgctgagccatcttttcagcccccaaattttcctttcttaagttgcttttgtaaggtactttgtcacagcaatgagaaaagtcactaaaatatagggtatctcttcttatgcctaatttataagcaaaactttactacatatataagggagaaacactgtaccgagtatttcctatggttttagcatccacaggagtcatggcagtgatggaactgaacctcacagaccaagaaagacattacaaacactcaccaggatactgtttcgctgtcagctctaacttgtgggacagcagcatggctccagtagtgttatctattgtataaacttgcacagaaccactgtgaaaacaacacttttagtgaaaaatgacaaaaagagaaaaggcattattatcatggcaatctatactctactgaaaggtgtacaaagtaaaaaccattctgtaagtaattagaagttaccttgtcaatctgaaaaatgcagaggtgacaactattcattccctttctacatactgtaggaattcctgacatttttcaggaagcacatacattgtttactactataattccaaaacaacggaaacaaccttaacacagagcaacattaggaaggaaaaataaactggtacagtcatacagtaccatatctataaccctgaaagaatgaacttaaactgtatgcattaacatgggcagaaatacaggtttgtgttccacacagacaccctcctcttcaacttgctttaggaaacaaacataattttgcatacccataaagttcagataaaggggaatcaagggcaaaatgcactcatgaccacaccttttttaaattctaaataaaatatgacaaaataaaatccatgaaaataaaatttcccttctttttgcccccccccccccccccgttttaaaggaatttactaagactgttgtggacctcactatgtagcccaagctacaatcaatattgtagaaggctactgcctcagccttctgaatgtgaggcttataaatatggaccacagtgctcaatttcaactttattttaaaactctccactatatgaattacagcaaaaaaaactgattttatatgtaagctttaagagtattctctaaataaaattactcatgtaaaaacatgataaatactaatatcttaaaggattaacaattaagatcctaaattttaatttatttattcttttttatttgtatctcaactctctacagtttgaaacatctcactttttttttttttttttttttttggtttttcgagacagggtttctctgtggctttggaggctatcctggaactagctcttgtagaccaggctggtctcaaactcacagagatccgcctgcctctgcctcccaagtgctggggattaaaggcctgcgccaccaccgcccggtgaaacatctcacttttacaaattaaaatattcagcctctgaaatctgttcttttcctttgttttgaaataataaaacaactttatattttatattaagataactggcaattctggcgggcataatcaagtgtctaagtgtctctgtgtcttaccttgcacagccaaatgccatcagccggtacttgttgttcactgctacacaggtcccatcaataacatcttgtggccaaacaccatgaagttgctacagtaagaaaagttaaaagtttaaaaagcatttccctaaacttaattgtagttcaaataattcttattcaataaagattcagtttaacaaagtatcatttggtttcacctgcataagaaatctcttacaaaggctatcatctaagtattttcgctcaagaagcacaaagtagtgaagacaaagtagaaaaaaaaaaaaaaaaaaggaaggcattttagcaaattttagaagttgaaaagcacacaaatggtaaagaatgcttaaaaatagcttactttacactactgggtacacaaaaggtctgggaatttgggtgtctctaaaagaatggtatagttggttcaaagtgtagttaagaagacttgggtcctctctaagtgtatccctaatgtgagtagccagtgaagactctacttccactcccatagaaggctgaacatttctcctttgagaagaacagtgaacatcaaagaaaagtgcaagtttataccttgaacctgctagcttttaaatctgccaaacctcagaatagtgaggtagtcaggtatacatatcctctggaagggacttcaggactcttttatatagaacaccagagacacaaaggggagagggagaagggaggaaagggagtagaataaaaggcgggggggggggtgatggaagggacaggatggagggggggacttaaagatgggaaggaactccataaagaaatagcctagtcaacaaaccccatgatgaaaatcatataacaaaatctgccaaaacaaaagaataatactattttattttgggtcttgaacaacagcaagagctacatgtttactatgtaaaaataaaaaatcaatagctattaaaggatatataattaaaaaaggaaagagactccttgggatgatgatgatgaaaaccctgaaaatacatctttgttcaaggtgtatagtaagcagtctggagaatacgtccgggctggagttgtccagaaagctctaacagaaatttcttaaagaagaaaattaaacaaacacctaatgatttaaagaatggaggcaatactaacacactgacagtcggtttggagttaagtgctaagtatttaaagaataggctaatggagggcgaggtgacaacttagtgcttgctgtgcaagcatggggacctgagtctgatccccagaatccatgtacgaagccaggtttggttatgtacttgtaaccccagtgctgcaggtgaacacaggtgggtctttacgacttgatggccaggtagtttaatctgcttggtaagctctagaccaataagagaccctgtttcaaaaatcaagattgacagtgactgagaatgccagcccaggttgttctctggcttctacaagaacatgcatgtgtgcataagcaaaggcacacatatacacacagcatcaaaaaataaagaacaaaaaaaatattaactctcagtggaaataaaaatccaaagaaaaggaaaacgtaattattaacatattttacagtttggtatcagcagaatttacaaagtaatatataaacaatggctaataacctcactaaaacaataactattgtaaggataagattatgagtgtgttggggctggagaagactgaaacaaatagtaattttccacagcatagagtcaataaccccataacaatcttatagtttgaataaaaaagtatgcaaagcaagagaacataggatttgataacaaagcaaaattaatatatgcaaaataaaacaattcaaaacacacaatccttacctctgcagtaaatctactggacactggtgtaataaatccaactttaccatcattaaacacaaccgcaaacccatcaagtgtggcacagtattccatatctttaatgtgcacatctgcaaaaccgaggaatgaacctactgatgaaaaatacagaaaaagagtacggttataataaactattacattatttcatggacttgggtagtgctaccatatgccatctattaaattggttctacctcatatagaaagtataactacctctagatgattggagatctactgaaaatggtactgtagaaagattgatggcttttcttccatttgtcattccttcccaatgaataagatgaagaagaccgtcagaagttgccacaaggagatcttctagcacagactgcaaactgggggaaagcaagcaacttaagtcaaataacttttaagacagcacactgggaaagcaactagcataaatgtaactgctttcaaaaaatgcttctgcaagccagggatggtggcacacacctttaattcctgcacgaaggatgcaaaggcaggtggatgtctgtaagttcaaggccagcctggtcaacaaagtgagttccaggccatccagggttacacaataagaccctgtttcagaaagaaagaagaaagacagaaaaggggaaggaggagggaagtaagggaaggagggaaggaaggaaggaaggaaggaaggaaggaaggaaggaaggaaggaaggaaggaaaagacatacagttgaaaacttaaaactctaagtatgaagccagccaggtctacattgtgtaatttccaggataatcagtaattacacagtgatactgtcaactaaaacaaaataacaaaaacaaaacaaaaatgacaaaatttttagctttagctaagtgcttaacaaagcagaccattaaattcttacaaaatactgtctataattgaaatattgaggcaacaaattaaagaataaggagttggtatggtatgactgatgacactgaagaggaaaaaacagatgtaactaactaaaggatggcaagctgaaactacagaatgcacatgtaacaaacaaccctctagcattgtgtaataaagctttcaaaaatagaaactctttacccgtacaatctgatgacagtagccaatgtagtaaaaatacacctgcaaattaatagagctcaaaagctctacgttgtaataaacaaagctgcaacaactgagcagatatacgataggaagatgtcaaccagaggaaaaagaaaagttcatcaatatacataaactatacaatcccaacattggattagtagataatgacttaaaatattttgacttaaaatgacttaaaaataattgtgacataaatgacaaaaaaatctatgtgagggctgacaagatagcccagttggtaatgcttgcctccttgcaggtttgggagagcagcctgggtaaagccaagatcatgcagttgtctgtctgttcctcactctctgcaacacactctctctctgagggaccagattctgtttttcaacacaagtgtaagaatctgagttgtgattcctagtatccacttaagatgtccaggtgtggcagcaaacacctataatcctagtgctgggagtgtcaggagtagacacaagtggatctctgaagtctgctgaccagaagtttaagcaaatggttgagggcaaatggttcagtgagtgaccccatctcaaaacaatatgatggagaaaaactgggaaactgggaagcaccagatgtcaatctctctctccctccttctccctccctccctccctccctctccctctccctctccctctctctctctctctcacacacacacacacacacacacacacacacacacacacctacatgaaaagataagatataccattcaccttattcaattaaaagtaaaaaaactttttaaacaatggctaatgtcagttgacaaaagtagtgaatatttctccaaaaagttgaaaagttgacttagccttgtcccaaatcactcaattgccactaacattttttagaacaaatgtcaagcacaacaagttaggtcttttcacactgtactggttcttacactactctgaatctcatccttagttataagttaagttagttctataataaaggacacagaaacacactgtaggtgtgttttgagttttctactgcaccattgcctccacagattattcatttttcactttaggatgctgaatgagttctaaatgattttattaatatgattagtaaggaatatgatgcacgtaatcacataacttgaagtagaatagtgtttctgagtaacaaattattaaaactcataattaaacatttttatcttttaaacattctctgtattcaagtaataacaagatggatgtttagtattaatctttattttttatttaatcaaaaataaaaggtaacagtacttttgctcctattagcaacattataaccactatcctaattttaattgattacattggttgtgataatagataaaagctgattatatagtctttcagtgtcttctctcttcacaaatgtacaggaatttccaagaagtttatattagaccacaataattttttttgaaatgcaattctctctttggaagtttaagagaaatctaagcctcccaactacctaaatttgcagaacctacaggtgaaagttctttgtcttggtcagggtttctattgctgtgaagaaatgctatgaccaaaaagcaagttgtagagaaaagggtttatttggcttatacttccttatcacagttcaacatcaaaggaagtcaggacaggaactcaaacagggcaggaacctggagacaggagtcaatgcagagtccacagaggggtgctgtttactggtttatccccacagcttgcttagcctgctttcttatagaaccctggaccaccagtccagggatggcagcacctacaaagagctgggtcctcccccatcaatcactaattaagaaaataccttataggtttgtctacaatcttacgaagacattttcttaatgaaggctccttcctctcagactttattttgtgtcaagtagacataaaactatccagcacagttacacagttggaagcaattcttccctttcctttggtggtgctagaacttgaacaatagccttaagcatggtgaaaacaggctctacatgtccagtcccagaaattctttttgcaacggctgtttttctatcctatttccatgtgttacatggctttaccaccaggtggagtcataaaaccaagttggattgttctatcttgtttgatacccacaaacattcaaaattccttctgcatcaagtaatagtctattaaaattttacttttacagtgtgtgtgtgtgcacgtgtgcgcacatccacgtacacacatatggaggccaagttgtgcactgctctatcacactacaccttatgtccttgagaaagggtctttcactgagccgcagcaaggttgccagcgagtaatccctagcaattctgtcttcccaccacagcactgtatgtacctacactcatacgtttaggtaggtgctgaatatttgaacttaggtctcatgtttgtttatacagcaagtgttcttacccactgacccatcaagtcatattcttgaaaaggcttccatcctatgcaaataaaatctgaagtgaccactaatcttagatcaacacagtgaatatgctaaactaaattttttcagcttaatcacatttaagcaagtaacaaagacattcttttccatgaggggattaaagaataagaagatagactaaacagggcaatgacaatagctcaccacttgcatgcctatcttgcacagtttgtttcagtgttattttaacaaaagaaacaatgcaagaagccctttgttagaactattaaataagaaaggtcttttagattcattttatagttgtatgttcagtctttacatttttcaaattgtttcacatttactatttattgattggggaggggatgcttgggcatgccatggtgcatgtttggaggccagaggacaaccataggaatcagttctctacttccatcttgtgagtactgggaaggtaactcaggtcattagccttggaagcaagcacttttacctacagagccatcttgctggacccatggctcaatattttttgaaagatacctagttaaaaaaactcttcctaaatctgttcattagcttcttatgtattcttctagaacaactgatttgtaataccttttaaaagcagatattcttattactatacacaccttgctcttactcaatagtttatctggggaaatgagcctcactattttcacagctgtagactgtttatataaatcacatatatgcagaggaaactatatgcaattggcttaagtaacaactaaaaggtcaatcatgaacaattagaaaataaagttaagctgtaaaataacttgaaaaaaatcaatgaggtactaatagatttttggtattttagtatttttcactgcttgtcatacaatctttattcacactggaatcagaaaacaatgttctttcaagtctatatgtacttccaagaaatatatggaggctgtagaaaggaacagctcctcttttcctcaacatgtgattgtatcagaatcgttttttagtatgttatcatatcatacaaaccaaccaaacaataatatatgaattttgacacaaaaacaattttcttgttggtcatttacttgaccaactacatggtcttttgtagtcaaaaaaagaaaaagtcaaacttaactaccataccgtacctcatgacgggtgcttgcaaatccagtattttcttcatttctaaatttagtgcgggggcacaatgttcttccttaaaatgaggtatccccttcatttgcggacttcctctaagagaaaaagcacaaggttaacacaaagatattaaatttgcccctactctgtacttactatacactcaattaaacaaacaaaaccaaacttaggaaccaggtattcatcctatagattatcaaataaaaatcaaatttgaattctatcacagtagacacatttatataccaactagatataagtgtgcatgactaatgtaacttgtgttgggggactgaggggaataaagtagaggaaaaaagggatggagggatggatggagggaaggcaaggaaaattaagatgaactcttaagagaaccaacattatgtttaaaatgactaagagcttccctagctaggaaactacagacgcaatatatcattccacatatagtggtgtatggttcaaactgttcattcatttcactttattccacaccctatctttgattcctattctctgggtatttatcagaatgaatgtaagattcagggatgtaattaggtatttcataaataacttggcaataaataacaaaattaacacacacacacacacacacacacacacacacacacacacacacacacacaaatccatggtgattaatggctgcataaggatattgctagatgaatgtcaagaaactgagcacacagctcttaaagactacaaaactgtcttgactttatctccacagggcacaagtgtatgctaataccagcctattcttcctcaaagcctgtgctgggatttaatagttatgtacctatctgtctttgggtttctactgctgtgataaaaaaaaccatgaccaaaggcaacttggggaagaaagggtttattttgcttacatgtctatgtcacagtccatcattgaagaaagtgagagaaggaactgaagcagaggccatggaggaacattgcgtattggcttactcatgtctttctcagtctttcttatataccacccacaatgtgctgtataagaaactcttccatacatcaatcataagaaaatgctctaggtaggcttgcctataggctagacttatggacatattttctcaactgagtttcccttccaaaatgcctctatcttatgtcaagttgatataaaactaaccaacaattctctagtgtgactattctccagtttcttcatgtgggcacttagtgttatgaattttcctcttagcactgctttcaaagtgtcccataagtttgggtatgttgtgtcttcattctcattaaattctagggaagtttttaatttcttttttatttcttccttgatccaggaatggtacaattggacattattcaatttccatgagtttgtaggttttctgcaatttatgttgttgttgaattctaactttaaagcatggtggtctgataagatacagggggttatttcaatttttttgtatatgtggaggtttgctatgttgccaagtatgtggtcaattttagaaaaggttccatgtggcactgagaagaaggtatattcttttgtgtttggatggaatgttctatagatgtctgttaaacccaattgggtcataacttctgttagatcctttgtttctttgttaagtttctgtctggtggtcctgtctaatggtgaaagtggggtgttgaagcctcctattgtgtgtgagattttatgtgtggtttgagcttcagtaatgtttcttttatgaatgcaggtgccttagtatttggggcatagatgttcaggattgagacttcatcttgatggacttttcctgtggcaagtatgaaatgcccttcttcatctcttttgattgattttagtttgaagtctaatttgttagatattaggattgctacaccagcttgtttcttgggtccatttggttggaaaatcttttcccaactctttactctgaggtaatatctgtagatgtcaatgaggagtcctcggcactctatgggtccccgggtagcggatcagtatttatccctggcgtaagaagggactttgggagcccatcccacatggaggaatgctttctcagcctggacacatgggagagggcctaggccctgaccaggaggatatggcagactttggggaacccccatgaaggactagtagggggctgggggggaagggaaggagaaggaattgacatgtgaatcaggcttgttgctaatttgaactaataaaaaataatctggaggggggacggacaaaaactaaccaacacagtatcttttgtggcagctatcaatcttgtcaataattggcttgctaacattactcctcttttcaatcacctataatcctgcaactcattttgttaatactactacagttatatgcaaaaagttcaatgagaccaatagcttttgagttttctggtttttgtgaaaattacttcgctgctcagaaacccactttgcttacattttgattgtggattttttttctttttcacatataagcttgatggtagcctgctgccatcttgctattgcagtgactaggaatatttgattctttctatgtctgacaagttaagctagttgatatttaaccattcaggtttgtgtacagccagtatgcttggctaatgtgacagtctctaaaaagaaaaagagtgattaatttgccagagtcacatttaaggtggtaatcatgccttctgtggtcactttcctagaacattctctacggtctaagtggttttaaagctaattttatttttcaaagtaatgtttaaaattcaatagttggaagacttatgaaaaaggaaaaaactgaaagcagtctctgaagactctgctaagacaagccaatcttgaagaaaaccctgttaattctattacacatgctcaaagccatacatttcccaccgtatcataaaggctttgtgtcttcccctacagtgtgtgtgtgtgtgtgtgtgtgtgtgtgtgtgtgtgtgtgtgtgtgtgtgtgtgtgtaggtgtctcattatgtaacccaggccagcttcaaatctatgattctcctgcctccacctctcaaaatggtattacaatcatatgctaattactgtgacttagtacattctttgtctttgacaatactaaaatctggcccttcttatggtgatgcaacattctgaaaatatcttttacattctaagagactggaacttttgctgaacctcacagccaaagttaataagtatatcttgaagtcatataaggcttaagacctctagcctattgtgtactcagtatgtttgtttaacctgcctttcagagaacaactgaacaatcaaccttacttgttctggacttcccatgtagctaacttttataacgtaagatattgcatagctacaaccttatgtactgtcccatgcccttgacccagataatacaggtatatctttgctgaaagtagcagatacaaaagttgaaagcaacttcctacaacttaccataaaggttgaaagcaaccatttatggttactggttgataaacaatgatgtttgttatctggtttgtagggatcagttggagccattgacttaatgccttgtaaaattctgttaaagatttctgtaaagtatcccattccttctccatgttgatgttttctatgctgttcaataaatacagagcagagccccttattagggacagtcacaccactcacagacagacaccacacattcatacacacagcacatacaacagacactcattgggacagacacacaaagacacagagggacagagaggttaaaaacagcttcacaagacagccctcaggcaggcacagattcagacccatgtcacagacagggaatatgaagtagaggattcaaatctagactggatcttaaacaactccaagggaaagtgccttttatttctttccttagtgcaacactgatgcattatttcatcaccagtgtattatagtttgcacaccttcccttccaccgaaaacccaccccaagtttagttatggttgcttgaatgatcataagttggagggttttttattggaacacataaatttatcaatggctataccactgaagaaaataataactcctcttccaggattcgatgttttttaaagtaagtgtgtgtgtgtgtgtgtgtgtgtgtgtgtgtgtgtgtgtgtgtgtgtgtgtgtgtgtgtaatagagtgtggggccttgtacatgctaggtaagtgttttaacagtgggcaaaatacctacaactctcagtggcacttctgtttggagatttttatctgttccttccccatcaacatcagacctttctttttcttttccttttttaaaaacctaggtcctaaactttcaaaataatagactttccaataagcatgtgaacctacatcattgtactgagcacttgacctgtgcaatctttgtgtaggtctgggatggtcatactttgtttccttaatatgttaatgggatttatgatattcggtgctttttattgaactcttgttaagttagacaatgaatttcacactaacctatttctggttttcactcttatttatgacttttgttctataaccatatacatggtcccacaactatttcactttcaaagctttcttttcccctcagaacctttttactgtcagctttttttaaaaaatacaaattatttttaaatgttgggtttttgaagcatcatacaacaaagaaatccacatcaaattagtaactcaaagacaccaacttcattcattaatttaacacgacagtatttaggataaattaaaaattttcactgtatcaacacaagaaaaacaagtcatttctaacatgctgctataattaaaacaaccacttttcagcagcaaatctactgcttgcttaaaacaaaactgatggtgaattgatgcaaatattccatatctgagagaaaaaacacttcttgtgaattctaacacttagccaatataatcttatttttcaaagggactctgccaaccctgtgactggagtcaggctttcaatgtttacattaggctactgtgggcaagctcttggtgggagaatggactgggatgtgatgtaataacaagataacttgtcaacttttagggacagtgagatcagcttttcattaatagttatttacatattagaacatgaatgagaagcaaagtattttgaaatttgcatgtatcatcaagttgaaacttctattaaggtcaaatctgaaaaatacacttggacatgtcttagtcttgcagagtacattcagtatatactttgcattttgttcaggttgttgtaggcgtttaagaaatattggttacttttaaaatgagggctaagtgcttcttttataatgagtatagctaaaatatttggcaggtaaaagcatcacactttcaaatactcctgagaaaacagtaaggataaaaacagcttcctatgcttttttaaaagctcctttttcatactgtctatagaaaataacacaaaatactgaagctaataggaaaactaagggactacttctacttataccaaatgggaaaaaaaatttaaaatttaaaaatttaaacgcacattttcagctgcaatggaaaacttactcccaatttaatggagcattgcatcttttcatgaaagatcaagtttgattatacacttgaaaagcacctgtggtaacattatgagtgcattcagtttggggaaaatagtttaacggctttctcagaaaaaaatattttcagttttttcagaacaaacaaaatagtgtttatgaagcccagtgccaccatgcaacctttattctgtcccatactgctgagaatgaatcaaaggcagacgcacacccaggatggtgaactggtactcactgttggcctcaccgccatcatagatttaatcaatcacatacctaacttctgtgccacaacggttgatgatgcagtcatgcctgtcgaaaggcaactataccccatccaggaacgaattcttgcccttggtgatatttctggctttgcctccaaatcggaccaatgatgggccacaaggacactcctgagcatgacagcttctcacttcaaaatctccttccaagcttgctcattattgtgattgtgaattctattatacatatctttctgactaatatcatcatccttccgcttccaccctttccatagcatggcattctagaacatcatctgttcagaatggtaattccactttttctcagagtctgctctcgaatagatgactcctctcttgaggtagacaaagcaaatggctgatctgagtatggagtctgattaggtggtagcatcaggtttgaaggatcaaggttctccttatcctttgatggagtacctacagtaatggcattccaatgtactcattggcctgatcttggtgggcaggcacagagtgtgctttgctctctctcactggatagatcggatgctactacagtcactggacagcctttcctttgcatctcatgcatcgggcatcctgaaggtggtgaaggtggctgatgatctgaagcatctgaggtgtttactgcagcagcaggagtagatgctgaggtgaggaaaagcggggtggcagtggctggttgctgccctccctgagtgttttggcagctcgacgtgggccccgcagcccgggacagtccgaggggagactcagttggaaactttagattggaagtcgtccctgtgattccagccatgggttcctcagcatctactcctgctgctgcagtttcaaagcttttatggaatttcttcctcctcctcttttttttttaagaccgagtttctatgagtagccctggctgttctcaaactcagagatccacctgcctcttcctcctgagtgctgggattaaagggccaccactacccagctgtaatttatttctgaacctctctctctcctccaaactttgtctaggcaattatctatctgaagggtcaactatcatttctttaaaatgtttttaattcctgcatgtcttcttttaagtcacccccacacccttttctattgtcaagtctcctacactggaaactttcctaaaatagctaacaatccttggttcttatatttaacaagttaccactaaaactcaacaagaaacccagctggtgctcctgcatcaaggccagctccctttcccctcaccccgacccgaccccctgtggtttccaaatacaaccatctcttaaaaaacttttctattgtggagaagtaagagtgaagtaggccttgctgaactatcactgtctctgctttagcatttcactttagtcatttagcaggactgcttaaagttccaagccacctaacagcagggagttccaggcctgtgtgggctatacagaaccgtttctaaacacaagggaagccgggcgccgacacgcctttaatcccaacacttgggaggcagaggcaggcagatctctgtgagttggaggccagcctggtctccagagcgagtgccaggataggcttcaaaactacacagagaaaccctgtctcgaaaaaccaaaataaataaataaataaataaataaataaataaataaataaacacaagggaataaaactagatgtaacagacaaaaaagtgagatatttacaaatatgtaaaattaaataatatactctaaccaatcaataggttaagggaaaaattgaaagaaaaattagaaaatattccaaaattattgaaaataaaaacataaagggatacttgtgtgaaacaatgaatttttgttgttgttgctgattggtgtgttggctgattttattttgaggtagagtctactaatatactccaagttaggccctgtgggattttctcgtagattcatgctacaaggcctctcaatactgatcctcctaactcagccgactagatatggagattataggcatgtggcaccacatctggtgtcttcagtttttattgctaaaatgcctatattaaaaaaaaataagtaaagatcaaatcttacatcttaaaagaccagggaaagagctgtgcatggtggcgtgtgcctgtaatctcaaaatctcaatattcaggaagctgagaggagacttgccatgaattcaagatgagcctggggtacagagtgagttccagatcaatctgggttagagtaaagcctgtctcaaaattcataaacacacacacacacacacacacacacacacacacacacacacacacacacacaaagacaactagaaaatgatcaaattaagctcaaaacagaatacaatacatattatttgaggggttgtggagaagcctcagagcataaactgcctgctgagcttaggacctgagttcctaccccagtagtcatgtaaaaagctaggcatagcatgtggctggaagcattgatccagcctgcccagcccaatcaattagccttgggtttagtgagagaccctaactaaaacccctccaacttcagggatcgtaaaacagattgtaagagccaaaggggataaatgaccaagaaaacagtatcttccagacacaaacaggactgatgcacataggaacccatatagacaatggcaacgtgcacagataccaaggctgagaggatgaaatggacacagtggctcctatccctaatccagaagctatctccaactggtatctgataacaaataaaaaattagttatctccaatatcgtctcactggttatattaatgacacttaagggcaggtcccatgcccagcagtagatggccaacataaaacgagcaagggtatttttggtagattttttgtctcattgctttgtttgagcatttcttgtcttactggccttttgtttgtatgatatggtttcaaatttgtgtttttacggattttgttttttgttttcattgtgtgtgtgtgtgtgtgtgtgtgtgtgtgtgtgtgtgtgtgtgtgtgtgtgtctgtgttatggttggtttgtttttatttgcttattttccaaaggcagaaagatagggtatggagttggataggtagggatatagagaggatctgggagaattaggtgatggggaatgtactgtgtatgtttatcttgttgttaaataaagttctgtttggccaatgagacagcaagttagataggactaggagtcaaagaggattctgggaaatgtagtagagaagtggtgatccaggcaggaagtgatagagcaaggagactcatatttaaagaaggagaaacaggaagcgtccctcttttcccctccactcctgctccagctgcacaatgtgatccaccagcaaggagggacgccagtaaggcgtctgataagtcttatcaaatatatagatttatgataattgagactgagctaacagatgagaagtcctagtcattggccaagcagcattgtacctaatacaagtttctgtgtattcatttgggccctaacttaggcggcggctggcgtaaagctcacacgtggtggtggggctcaggtggcttttggcagaaagatttatcataacagttaggagaagagaaactgtgatcagaatatagtgcatggaaatttttttcaaaaaaaaaaaaaaaaggtggagagtgatggtggaaagacatttcctggtcttcaaatccactctcatacaaacacagtaacaaatacatacaatgtgttatacacctctctccctctgtctctatctgtctctctctcaaacaaacaaacaaacaaaaaatcataaaaaagaaaaaactaggggaccagagagatggcttagttgctctttcagtggacctggtttgatctgtctctccagtcctgttgctgtggtaacaccatgactgagataaggaagagtttatttgggcgtttggctctagagggataaaagctgtcttgatgaagaggcatggtaatgagcagcagtgagcactgcagccagaccgtgaatctgagcgtctctatcctcactggaaagcatggagggagtaagtaaactgtaagcagtgtgggactttaaactctcaaagctgggcctccattgacacactcctccaacaaggtcacaccccataaacctccctaaactgcatcagcaactgggaaacaagtgttcaaatgcctgtgcctacaggagacaatcctcattcaaatcactgcagacagcatgctgttaaccttaagtaaacatgggaagcacaaaaaggaaggtgagaattctccaagcaagatttttttttttactgttttgcagatgaagaaatcaaggtccagaaaaattaagaagtaaatacacataaaaaatacacatacccacacataaaaataaataattttttaaaactttcttttggttttttgagacagggtttctctatgtagccctggttgtcctggaactcacgttgtaaaccaggcttacctcaaactcagagatccacctgcctctgcctcctgagtgctggcattaaaggcatgcgccactactgaccagctttaaaaactatttttaataaaacaaaacaaaaaactatttgagaagatatatacaaattaataaaatacaactatagtgaaaaatcaactaaaatcaccagctggctttttttgaaactcaaaattgaaaaacataggggttaaaaaaaaaatctaattctctcccttaccatggggataccaggaattgaactcagatcatcaggcttggtagtaagtacctttacttaaggagcaactgccagcccaagattctaatttctaaactcagaaatcaaaagtgtagtcattactattaactatactgaaataaaattaattacagaattctatgaaaacctgtgcaccaacaagttagataggcaattttaggcaaatttctagaaacacacaaattttcaaacttattaaaaaaaaaatctatgccaagtgatgaaattgaaccagtgatcaagaaccacctaaaagcaggctgtggtgacatctgtaatcccagcaattggaggggaggtaggaagattcacacaacccagaaaaatattaaagacttttcaattaaagtttgggaagaaaatttgggcagaaatatatctagagaagatatataaatgcccagttaaatgaatgttaaatgtgatcagtgatattattaggaaaacgcaaatcaacatcatatgatataaatggaatggccacaatacacacagaccacagatacatacacacacaccagagctagctctctaaggtctgtctgctaaactctgtcttgaagacttccctccacatcagtctttcttctctccagggattcatttccgatgctgctttttacacgtgattttcccagtaacactctggaaatacgttcctttcctaggctcccacctgaagctcttttatcaggagctcatttgtagtactcacctgcttaacagtgtccggaatattacttgaattcagttcctcccctttaaatttagttcttactgtttatcttacatatacccaacactcaatacatgtcttaagtgagcacaggattaaaaagctcctagtgaacagtactggttaattcctttagctactcagcatcccctttgcagtcttatttctcaaatcttgtttattccaggtgattaagacacgacactggatacaagtgatttttgcaagtaagatggatacgcatatgtgtattgacagttttagtttattaatgttactttgagttttgtattttattagtcatacacttcagaaatgaaacatctttggttagttaaggaacactggctttgccatatgatagctaccacatccataaacaacattagtccaaattctgcaaaagctaaaaattactgaaactttagaaaagaatgactgataccaagaaaaagctaacctttcacatgaaaatctatcattaaactacactttgcatttagagtaaactaatacaaataaattaaatgtagatacacatgcaaaagacaaatatctggcaggagtgctgtgtacacatctgaaaacagaagaaaattgtggagagggagggaaagaggaagggatagagggagggagggagaaaacaaatgaacaaaaaacccagaagtaaatcttcactctcaagagacaaaggcggaagaatcatgagttcaaggccagctttagcctcaccttgtttacagaatttacttagtaaattgccactgacttcaatgcataaaatccaatcataaatctagattcggaaccaaactgcataaacaacagagatggataaaagcctcagattactacaaaaattcgagttagaaaaagttcaataattttagtttaaaatataatttacatgagacttgttaaaacctagttaagtaaacagaacatatctagagacattaagttgccattaccatttgaatgtagactgtttccctatggaacatgttagaaaatgttacatttaatatagttacattttctacataaccaaacttgaatgctgtttgttattaaccatatttaaaagtatcattatcgcccaatatagcagggcagtggtggcacatgcctttaattcccagcactcagaaggcagagacaggtggatctctgtgagttcaaggccagcctggtctattgagcgagttccaggaaagcctccaaagctacaaagaaacttgtctcaaaaaacaaaacaaaaagccaggcagtggtggtgcatgcctttagtcccagcactcttgtggcagactgacagcctccaaagccacagagaaaccctgtctcgataaactaaaacaacaacaaaaaaaaatcaatataataaataagctatgataatataaacacatagctaactttagaaatatttttaaattttcaggtatcacatatattaaatatttcgccaaagttctcaaaaacaagaatgccactgcttctatttggtaaatgacccaatttgagacatgttttagaaggacatctgtacttttagacagctttattaagctttattattcttcaaagtggagtttgctgtaactctcatatttaattaacaaaatttcccttctattctgaccacaaatgagcggtcttaagtatccagtggagacagtttaacaattttaaaggcaacctagacaacaatgccagatgcaatttataagagttaaactgcttttttcccctcattctatatatataaaataactggagagaaagtaaatgccttttccaggtcagagaagaactaaaacccagttgatttgaaataaaagagcccccctttccacatttgtaatgggttgcttgagtaaatagcaaaacacagataaggaggacaaggaatgaagctcacctttgcttttctattctgatgagctattacatattcatgtcgataaagagcaatgaaaatattaaatgtttcagtgtgggagggtaggtcaattactgctcaaatttgtaatggccttcaggaataactaagttaccaatgaacttataaaaaccaagattcaaaattacagtattctcaaatgtaccataaaatatgcagaagttttaaaggaaaaaattaaaatcaccttcaaagtcaatcaaaaatactctggagggttacaccagtgacacagttaactgctgtgacacaagttcaacaggcttttgtttgaacaaattctcaggtgcagagatctcaaatactactaagtgccacttagaaaatgttaatagggcacatagcataatggatttggggtatggacagaaacttcaagagttcagttagagtcagatgtggtggctcatgtctatgatttatgacactcagatgggaccataaacagtgcaggggtagcctgggctacacagtgagattctgtcacaaagcaaagcaaaataaaatagaacacagagtgttttctttcacagaacttactccaggcctgtctttttccaagcaaataactcaaatgtttgtatctacaaaactctctttttctcctatgtatttcccctcaaatactagtaggacttttcaagacattcactcactcacttttgttcatttatttttaaaatataaactggataaaaaatacacacacaaaaactatagctacccaacagcaagcaaaaggatgatggtttcaaggctagctaaggctacaaagtgagaacttgtcacaaacagaaaaaaaaaacaacattttttttagtaaaagtccctttccagactaccatatgcaatgtagaacctaagcataacacagaagtctcactaagttaaagaaagaaaaaagattaatgttcagggaaacagatttgtggagcagagcaacagaaaggctggagttacactgaaaaagaaatctgttccctttacaagactggatactaagccgttcttatgaaacaccacaccgagtcagacaaaggataagctagtaaggctgggatgccccgaggaggcctctagttctgacaggctagagtggagcccatggaagacaagtctaaagaaaggcgcatccatccttatgaagcatataaacaagcctcaaactggtcagcaagttttccaagtcacctgtcactcataacaaacttcaccattatttaaagaaaaaccacaaaactcttcaaatggaaaacacgaagatcaggtaatcaacaatgtagtatgatgccagtatccaaactaaaataactagacatgtgatatgacccagtaattctacacacaggtatttatttacccaagaaatgtaggacaaatagagagtaggatgggattataatctaaaaaagcaaaattcacatttcaaaatctttatacacgtctcattgtctagtttttaaaaatagaacattgatttcaggtataaaattttaaagagtgctatgggaatatatatggaggactagtgactttgtgagtgcaaagtagagcaagagagttgggaagaaattttatagaataaaacagatagttgctctgagttcgaaagccaggccagaacacttgcttacataaagagatggtggggaagcataccacccagagcaaataacaaagaaatacagaaatgtgaattctaccacattctacatatgagaaatataggctccaaattccataccagggaagttggacttttattttgtggcaactagagagcaataaaaagcttttaagaatcacatctttgggtttctgtttttgaaaaataatgcaaaggatagatctcactatacaggagagactagaagaaaaactagtgaccagatgattctagaagcactggagaagtgtaattagtcaatgaaacttgattactgaacaaatataggaagtgaagagaaacaaagaattgtggttctccacttcacaggactacataaaggattatagtaactgcagtcaagtttggtaaagcaataccagattcggtttggcaggtggtaataggtatggtttaaacatcatgaatttgaggctgctaatgaaccacttaaattgacttaatcatagaaaggtaaacttggcactcaagaaatgatcagatgtataccaccctactcacatacagcacagttaaaagcagagagagagagagagagagagagagagagagagagagagagagagagagagagagagagagagaaaacacctcttgaaaacactaaagcactgctcaagtattataattgagagtgctgatttacacccaatgacaaattcatggaatggatggcattagtcccacttacttatcacataagtaaaatggagctttaaaaaaaaataaacacacacacacacacacacacacacacacacacagcaacataactaatccgaaaaccataagaaattttatacagggaaagggcaagtagactatgtttagatagtttagaggtaaattgtaagtcccaagttgggaatcgggaggcaatgaaagatatatgggaaataaatacacattggtaggctgaaatggactttataggctatggtgtgaaggacgagggagaatgagtgaatcaattcaagtacatggcggttctctgtacagaagggactggctctatacttttctaggattaaattgctttaaaagtcacaatgtagtatttcatttttatagttactacataaaaacatccattcttactaatgacagatccttacattctttcctcacatcccccaaatgccattcccccaagtgtatgttgtgttctcctatttcaagctgtagtttccttcctcatcccctaaccctgctttatttgtctgaataacacacaatgtgttataatcatgcaagctatagaagtaaaactgttttgtttcccctccccccacccccacccccaccacatcccactgctacatctctaacagctagcagctttcacagttcctggagacttaaacaaacaaacaaacaaacaaacaaacaaaaggcagaaactacaagtgaacacttattcttatgacctttaatctggtaataacaacaacaacaatgtgcacagatgtatgaactaggcagatatacagagttcaacagctagcacacatgtaaatctacagaacagacacatgctaaaatcaaactagttataaatgttttgaaattctcaaaaagaaacatttttaagacctctatcacctattcccaaaataacaagatatcaactagaaggaagaaaaattagttaaaattttctctcacaaaacctaacactgctgggcagtggtggtgcaaacatttaatctcaacactgggaaggcagaggcaggcagatctgagtttaatgctagcctggtctacagagtgagttccaggacagccagaaatacacagagaaaccctgtcttgaaaaatcaattgatcaaacaaacaaaacaacaacaaaagctaaacctaatgactcattagcaataataaaaaggtacagtcattgaaaggttcaggttgagaatttgaagcccttattccttaatctgccacatctaacactccacctttttaataataaataaagttgggaatgaaaggttcaggcattatgctgaactgcccctgttacctggcagaatccactcaagcagtaccctggtaagctcaggattccatgggaactgagtctgcacacaggtgtagaggacccctttaaaagacagacccctgccctcccccttctctcttcagctcttctcttcactcacgccctcttctctatctctcttactctctgccctgctctattcttctctctctctctctctctctctctctctctctctctcttctctctctctctctctccctccctccctcctccctccctccctcctccctccctccctccctctaacaaactggttaatatgctctctatagtccatctcttgaatttctaatttaagcaaaagaataacaatcatgtatcaccaaaatgtttcaaaggtgcatttcatatatattggtagtcccataaaattaaaacggtagaataattcccatcacttaataatgttgaagccattgttaacaggaagcacaacacattcaccacttgtttgtggtggtgcgatgttaatataaacaaggctgctgaattgccagctgtgcagaagtatattcagagttcctggtgttggctatgtaaagatgtaaaaactgtgcttataaaaaatgtaaaggcgaagggtaccttttctatttttagatatgcttagatacacatggtacaaatatcattgctcatagtttcagcacagtaatatgctgtgcaagattgtagctgaggctctaacagctgcagttccatttgctatagcacctgtattcctggaagtatgaagtgcctgaagggtgcatttctcagacaagtccttgcctcactttatcatgtacataactaattctggcctcttttgtcttctacacgtcatgtgagttggtggacttttctggcccacaagtaggcttcttctgacaaaaacagctggatttttggagataagctgctgaaattaacaacagctaatctcaatttcttctctttccaaccagtactacccactgacatcaaaccagtaagaagtttcacatctgatgaaatgtattgggaagaaagaggcaaaggagtaataaggttagagctttaaaagtgattgttttgggaatttttttttccagtggagaactgagtacctatgtctttaatatcagttaattaaacatcccaaattttagtactgttagtaaatttttgcagagctggttatgacttccaaaaccttgtacatgctagacaagcagacaaaaccactaaaccatacctctagccccagttaacatactcaataaagctagtttaaagagagagagacagagacagagagagagacagagacagagagagagagagacagagagagagagacagagagagagagacagagagacagacagaaagacagagagacagagagacagagagacagagaaaagttaaattgtgcatggtggcatatgtctgtattcttagctacttcagaggctgaggtgaaaagatcatctgaacccacaagttcaagggcaaacctgggcaacacaatgaagccctacctcaaaaacaaacaaacaaacaaaagttaacagtgctggaaagatggttgcaggaggagagctctactcttcagagtacatgaatgtggtagcgcatggctttgatcccagcattcaggaggcagagacaggtggatctctgtgagtttgaagcctgcctggtgtatagagtgagttccaggacagccagggctctgctacacagggaaaactctgtcttgaaaagcaacccccctccccccaaaaaaccccaacaaccacaaagagtgctagttggttctatgtagccctggctgtctagaaccccaatgtaaaaccagctatcactggtttgaggtctcaaacaaaccaaccaacaaacaaaagctacaaccaaccaaacatatgactacaaaagaaccccaaaaagagtacatgagaattaatttgttgaaattatttcatcatgaagaaataagcaatttcaaaatctcctaaactcatatttaaatatagttaagtaaaccaatttcaaggctaaacataattatttctaatttgtccacagcaaagtttccatcacaaattccactgcaaatcttaaaatataaaaaaaactaaagccttcagcaagtctacatattggtaaagataaagagatattttaatatagggtggaatttataaagaaacaaaagataaacaatgtcaaagaataaatgacatttgaaatcaaaggagttatttaataagaccaccattattgttgaagactccctgactctacaagaatgccagaaacattaggtggaaactgctaaagaccatggagatctgagctgtgtgctcagctggagtgtaatgggaaatgatgtgcagtctgaagttaagacgctgtcatgtaatacaggaaagctgagatgctctagaaataacgtttatgtgatgaactcctaagatgaagaagaagaaacaagagacggtgctacttctataattgaagaagagacaattaactgcctttattatgccgcctctgacttcgggactattacagacctttctcattcttcctttttttctagtctttattccccaagtcttaaggagattgctggatgaggcacaaatagggttgaagtgtgtggtatcagaggctaaggagtatggactgtggaattgtaacaccatgtctgaatcctggctctggtctacgactgcatcagctagtgatgatgggtggcttttctgtgcagcagtttgtacaacatgtatcttaattatataagcacttacaatgacatatgtggtaacactgctaaaatcactttttttcactctcctctaaccattatatggccgcaacttttcaggttttaaaatcaagaacttctgaccaaaaaaaaaaaaaaaaaagtaatattgctacctttctctctcttttaaacaaatggtttcttcagaaaacttactgaaataagtaattctagaaagtactggagcacacaaatgcacaggagactgaactgtatttgtaccaataattcatacagtagttactataagttatattctgtaaaagattctgtgtatattttattttctattttttcttagcttactttaaaaacccttgagacactcatacatgaggactctgtctatatcactcctgctactgtctccccctttcaactcttccatgtcccaccccctaccaaattcacagcctcttaattattattgttacatatgcacacacacacatggtgtatgtacaatctatcatgtcaatgtagcattcattgtatgtatgtgtccagggctgacactatgctggagcttctccttggaggaaactgatttcccccttcccagaagttactgaccaccagtagttattcatttaggagtagatcttattgaatttcctccatctactttggcatgtcaactggtattgtccttactgttgagagttcctaggtgcaattcccctgtcatgtctagcaccagacatcctggttgtccatgatggttgttttctgagttttacacacattttatgctaatcattaaattattatttacatgtaacaagtgtgttttacctatgtgaaagtactgattataaaaagatgatataccacatgaagtgttatgctggctagatagaaagagtcatttgggaagtgggaatctatgctgagaaaatgtccataacaacttggcctgtaggcaagtctatgggggcattttcatggttgatgattgacatgggagggtgcaatctatggtgggtgtgcaaaaaacaggttggcaagctgtgaggagcaagccagtacatgaaatggacatgaaatggacaagctgggacatgaaatggaaataaactctttcctccccaagttgctttagattatggtgctttatcacagcaatagaaaccctaaagatcatatttcattaattctattatataaaactgttcttaaattatttttacttacaatgacaactttgaaagtttcaggacattagatggacaataagttaggcaaagaagcaagaaccaaaatgtcattgtcttttgtataagtcagaggatccaagcagcctaggctggctagccagcaagctccgggagctctgcttgtttccatctccccagtcctgggatgacaagcacatgccaccatgccttgcacttttatgtgggttctggggactgactttgggtcttcaccaactgagtcatctttccagcctaaaaatgcaatatctgctcacactagaagaaacttatctataggtttgaaataataggcaaattaaatgtgaaatcaggacaacattatgctaatacaattggtttgctgtggcatttgtctaatataaacaattataaacagctcagcgcaattagtatttgggacaatcattgtagtgttacagtgtcaggcacatttcacttctcttcatcccattagttttgcttagtcttcttcagtaaggtcgtgtgtgtgtgtgtgtgtgtgtgtgtgtgtgtgtgtgtgtgtgtgtgtgtgtgtgtgtgtgtgtgtgtatgtgtataattttaatatatgttttatctatgtttaatatacaaataatataatcattattatctttactaattaaactacgttattatactattaaatattaatgttaaatattaaaaataaacatcctgataatccctaataatatatatattattaaatgatatatctatattttaggatatattttttaatatattgtttatatatattatatcatttatataactgttatatattatttgtgtataataatagtatacaaataatttatttatggctttttcaatctcaggaatttcctctttgtcatattggcaacagtctctcatgtaacatcaagcaaacttttgacacagaagtgatttgctcccagaaacaaagatgttgtactttaaaaatatattttttttaattaaaaactaaagcatgctgtggaggaaatgtgcaaaatataatgacacagtttaaagagcaaaagtccatatcccctcaaagtttggaaggtaactactgtctgtgtgggttttttcatgtgcgtatacacaaacacagtcaaaggagcctataatcgactaagcattcacctcttcacattctctctcagctctccatctcaataaagactagaggatatctgacttggaatatattactagtaattctgaatgtctaagaaaggagttataacacaatcattagtatcctttaactcatttattacatatttttttaaattaaaaaaatgacatttcaaagactgaaaattcctgaagcatcattttagaaatgtaacttaacattttactgactttagacaaccccaaaagacattctttaaaaaatattaagtttgcaagccatgtactagaagaatgaaagccaataaacttacttgggatatactggttcataaaggtatttgtcccctcttgaagaagtaatatgaaaaaacaagatgtagccatttgctgtctgaaagagaaattttattgaccgtgaataagaatgttgaaactgttaccctaggctgtaattttgcataccaggacaatgaaatctcattcaaccctctgaagaatagtctctttatatatgcaaaatgaccttaatataatctatcataaaatgtttagcaaatttttaaaatgttttataaactatgtaactgaaatccagtttgtagactattatggacatgcacattctgaaacaactgataactcaatagatgagtactgtggaaaatacctagcactttctgaactctgcaaaaataggacaaatagtaattctaagcttacaaagcaatacaaccaaataacaaaagtataaaatgccttattgtacccaaataaacattatcatttacttcataaacagcatactttatatagttaaaaattttaaagtttttactataaaatatattgcaagacaaaatcttgaaatttcaaaatctaaacattagctaactagtcaatctctaaattcccaaatataagcatgtgaacttcaactctgcacatctaaatttccaaagtaattaaatattataaaaacagaaattgtatttaaaaacaatgttgcatctggtgactgaagcaggttcctagccagcctggactaccctaagggattctatctcaaaaacaaaactaattcaacaacaaaatacaaacaacacaaaaacagttatatgaccacggtatacacctgtgacttacaatgctcaaacaaccacattatatgcttaatactatatataattgctcctacaagatgttttcattgtataatcaaataatagagtgaagtggcaggccccccgcccccccctcaaacttctttaccctaacactcaatttctatcctctcagaggtaagtgaggctgaacccaaagtagaaacaatcaaaaccaaagaaaccatccagggtttcctatttcttcccagcactagctttctgttttccagttaaaggaatgacagaggaaacatttcccagagcagccagggtttgctttgactataaagcttacccttctgtaatatattttcaaaaaccacagtctaatttcctggatatttaaaaaggtatcaggaaaaaattaccaagaaaaggaataatctgacctaatttgatctctgaagtccaaaaagaagatggaaccccacaattacaccaggattataataaccaacatcactcagctgaaaaacaccacctaccacctaaagatcagttttggactatacactgctcaggaaaaattcgaggaggctgagatgatccagtcccacagtcaactctagccaggacttgggacaagccctgtactttcccattacacagagactggacaacaaatgatacaactacctctcccagaacttgacaattaaccccaatttttcttttcaggatcccctaaagatgtcattgccaccagacagcaggaagaggtgggggtgggtgggttttggtcattaaataggttatgtatatttgtcactgtttaagggaaatggttacaagttgttattggttaccctcaggaagaaagttgaaccaagggaattagattcagagttgttttgaaaacaaaaaagggggatacaggtatgataggacataagggtagattactgaatctacctttaaaaagcaactactagttttaaatattttacattggactggatttttgtacatggcatacaaattttgtatattgacaaatttgagattaatatggtaaaagcatactgtacaaatgtttctaaccttgttcaaagtgttgtatctatacagcccatttaacaatgtaatgcagatttctagtccttgaaagttattattaccaattatataggataataaggaaatgcatattagtaattagccacctacaattggatttgtagtaatattaggtatgtttacaaggtcaaaaagatatattttagatagacagatcatcttcaaacacttcagagatctacagaatatggcatttaagatgttttaataacgtagtttcttttttatatgacaatgagacatgtctactcctggcagcactaatctaccacagagaagaaactccacatggagcttacattctttgtggcaaaagtaagccactgagcaagaagtgcccttaccttgactgctgacactaagctgttcaaattggacaagcaggacacaaaagacagtgactgacaaaccttgcttcatagaaaagtctgtccaatattctaggtctttaggctgaaaatggatgccccaatgttgcagaggaaccttggtggctgtccaggcagccagctgcttttgtcatttctcacagtttttggaagtcgcttgcttgcacttcctgtttactcagttaatactgtttccttcttgggtctctgagagagtcgaagactagatagctatatagtttttcttagttaccagatgcagaaaagaaactcactaaagaggtgtaaagtgtgtaaaattgagagatatcaaaggatagttttggatggtaacgcaagttatgatacaaaataaattaggtacaagactttggactcaccaagataggatagataatggggtatgttctctgaatttgtcaaatgtaaatggactagacattattgatatacctattgcctgtatatattgtatatagttattatacttattagatatagtttttcttatgttagttataacattctttcttatattagacaaaaaagggaaatgtggtgatattttgtttgtaatctaataaacagagcttgcctaaagatctgaatgcagagctaagccattagttaaccacacacctagttaagaggtaagccactagtaagccacacacacaaaaccaatagctagccatagaggacaggcagtggtggccacacttttaatttcagcattttggagacagaggcagatggatctctgtgagatcaaggctaccctgtgctacatgagagtggatcagtctaaaagagaaatagagcttattctgttagtcccagtaccagagagaataaaggcaggagctcagtgcagtctcagggcagtctgaggttttggtggagagcattgccgttactctgaggacagggtcacccctctttggtcttaaccttggtagtggtaagaactctttattggcttggctgctttgcttttctgatcttcaacttgaaccccaatatctgtctctgggtttttattatttgtgctacaagaaggtaaagattgttcagaaaagattatctttcaaaatcttcatggtaattttacattcttacaaaagaaaaacaaaaggaaaatagcttcaaatcaaagcatagcaaaagtcacaaacatatcctacaacatgaatgatgagtgttgtagactttactgccacctcataagggcgggaacggcaatacagaatggtcagttcttaagacagtaacattaacttacaaatgctgtctggaggaccagtcattcaaaggtcagatgatcaaatgctaaaaacatacattgcaaagtaataaagtatacagaactataaagtcagtgagaataaaaccacattgtatagcatttcatttaatgcaatagtgaaaacacaaataaaaccttgatttactatttgatatttggtatcaatcatttaaaataaatatttcagacttctctgaaacatttggtggagacaaacaccatacaaatgtctaaatctcagtgacatctacgactgagatttcataaacagttctgccttagaacaatttttaaagtcatggtaacaaatgatgtccctatagtaatcaccaaatctattactgtgcaccattataacggcctttctctccatgatgcccaaataatataaagaaagcacataattattgcttaatcttttcaggcagcaatcttaattccctctgataacatacaataaccatccaaaattcactaaactaatttctcttgaaataacaatcaaatagcaaactgcaagatccaaattcctcacattgatctataaattgcactttaattttcatattctttattatacatgtttaaaataagaagaaatataaatcacttcttataaaaataagaagaaataaaataagaagaaatataaatataaagttatactgttctcccaagataataatataactactgggcacacagacaagaatatacataaatggaaaatggtaagataaacatactgaaataaaggtggtaagtatcttttgatttgaacaacattcatcagttttttttcctagctaggcatggtgacatacagctttaatctcagcactgtgaagacagaaacaagcagatctctgtgtaggttgaaccagcctgatctacacaaaaggttctgagaacctccctcaatgaatgaatgaatcctaagcagcaagatggcacagtgggtaaaggtacttgttgccaaatataacaatctgaatttgatccctgggaccatcatagtagaaggagagcagactcctgtctctgacctctattcatgctatggacatgcacattcccattcacaaataaattttaaaaaattatgttcctatcactatcacatttgtttatactatggatctaatttctgttcaaaaatcaaaacaaaaccaaaaaacaggaggaggggagcgagatttcagcttctaacaaaactggattaaaattgaagtagatttacacttcaatctgacacaattttaaaaatacttacaatatacattttatatatgaaacaatgactttcaaaaccacattaaggactgtcttccttggaaggtgggaaaaaggtgaaccctattccacttacacagcaggcataaaccaaggcagatcaaactcttccaaataactaactacatcccagaaagacttacaggactgcaaaagttccagcatccaaccaagttaaatgacatcacttagcatcatctacgcccaataaaatgattactacatgtagagagatacaggacactatcaaatagaactaggaagaaaattaaccaaacaaaataatccagaatacaagtaactgaaataaatacaaaaagccatttgaacagtaacaatattctttttagcattttttaaggattttattttataagtgttttgcctgtctgtatatatgtgtatcacatgtgtgcctggcatccacagaggtcaggagaaggcataagatgccctggaactaaagctgtttacaggtggctgtgagccaccaaacaggtgctgggaactgaacccgggtcctctataagaataacaggttctcttaaccaccaagccatctctcctgcccccagttactttgctgtttatcttcaaaaggttagacaaataaaaaataccaaaatataactctggggataaaaaccaaaacatgtgagattaaaaatgcacaacaaacacatgatcaatagtttagactcattaaaaatgcacaacacatcatcaatagtttagactctgaagaaattaaattttaccataaaaatcacagcaataaaaattattcacaatgcaatgggaaaaaaaaaggacagaacaggaataattcaagtttgagatttcatgtggcctaatacaaatgatgctaacatttctattaaatttcattgcacctttatttcctttacttgaattaatttttttgttactttattttgctcatgtgtttttgtatggattggtgtatatgtgtgtgtacacaagtatcacaacccatatctagaagtcaaaagacaacctgtagaagttggttctctccttctacttaataccatgtgggtattagggtcaaactcaggtcatctggtttggcagtgactctatgatgtggttctttgctgattgtgattctaatttggagttctgaaaactactcaaggaaccagaaagattgatacaagtggataaagatgcttgctgtcaaccttgacaactacaatccatcccccaagatgcacaagttgtcctttgacctctttgtgtgtggtagcaagcatgaacccacatttaaaaataaaaacaggctctttatttttcttaaagttagcaaacaaagcaataggtctccttatagtaccttcatatacacagtgttcttacttgtcctaatttcccaatgcccctttccactttcactggcccctcctgaagacccctgactacccaaagactcctcttctactttggagtcccataggttccgttatcttgtcttctgtccttccctactaccacaagatccttccatcacaggtccctttcacacacatacaagtttaaatctaggttccgaaaatgagaggaaacaattgactttatctttctcagtctgaagataactactgcaattctctatagttcatttgcagtgtccataataaaatacaaactctcagacattaaaatgcaagatcacagacttttacaaacaaaagcaaagaaccaggatactagcattagacaagaacttcagggtaaaaggaaagaaccacagacaagagaataaaattttcactggaaatttaaatgttatataaaatattttagatagatataaattataaagttaagccgggcagtggtggtgtggtgcatgtctttgatcctagcactcaagagacagatgcaggtggatctctgttgagtttgtggccaacctggtctacaaagtgagttccaggacagccacagccagagcagttacagagaaagcctatcctgaaacctgcccctcctccacatcataaagttaaaatacacacaactccaacttaatatctgaatgaagacagtattgcacactgcagactggacaggtttcataactgagcaatgtatccaatgagaataaacactataaaacagaaaaaaatgggaaaagtagaccaacagaaaccatgagatgttaaacacatacacagacacacatccagtcaattactatcacagaacatatttatgtatttatggacatgtacataataataatacttaaaggtaaaaggtcataaatttcgagagggagtaaagcgtggtgagggtgtggaaggggttggaaggaggaaaggggaagggggaaatactgtaatttatatatgaattttaaaaaaaaacgaaatagcaaaaaagtaaagctataaaaaggtggaaagggacaaagcaaagtcagggacaaagcaaagtcagtatagaagttaacacctgaccattttcaagttgaggatcccaacccacagattcaacaagtatacagaacaccaactagtatgagcacaacaaaaactactctcatcacatcatagctaaattataaagtcccaagacacagagaaaatctggggtataggaagaacagggaagttacttacattactttcaaaggatcagtaaaacgcctagtcactaattactccatagaaacaagtgaagacaatgaactcctaatctttttgtttgttttctgttttttgagacaggtttctctgggtagctctggctatcctggaactcgatctgtagaccaggctggtctcaaacttcaggatccacttggttgtcactaccactcagcttaatctttaacttaagtaatcttcaatgctgattagatacccttgaaaacactctgctgaaatgaacatctttaactaagcagaatgggatacatattacagagttaagtaaattaattccacttctttgcaatgcttgggtgttcaaacctacgactgtgccctgcactgctgaactactaatatgtctccaggattcttctacttttgagacaaggtatcactaaattgcccaggctggccttgaaattgctatgtaacttggtcaggcctttaatttataatcttccttcctcaggcctcccaagtacttgggattaaagacctaaaccactaggtctgacataaatttattcttgtgtcttcctatttacgtttttttttttttttttaaactgcttaacaagttaacaggggcctagtaacaaacctgagttactatatctagcaaaaatacctttcaaaaaataaaaaaaaagaaaaacaaaataaagacatcaccaaagagaatagaagtaaaaaataagcaaacaaaactaacaacaacaaaaagctgggcatagtgagatgctcttgtaaccccacaaattggaaactagaatagaaggatgaggagtttatccaggccaacctcagctatatagtttgaggccattctgggcaacaagagtatgtatgagagtatctcaagaaggaagaagaggagggggaagaaaccccactcaatggttcaaggtaatttttccacatgttatatcttccttctacctggaataatatggggactccataaatgttgaacaagagaatgaatctatggtgatttctcctatgtccacaaaacttgtataagttaaataatttaatactaatacttcaatgtaatctaaataagtttccctatataaaatacttatcttaggatgtgtgtgacctttggtcatctacttacaaatttttaacagatcaatgttttgacattgttactactttaattcaatgtcatacttgtttaatccagcttacaagctaatataactttaaagcccagagataaactaagtaggtaaaagttgattctgatttatttcaattaaagtatgtaatttctctattttctgttccatacatattactacaaacctcccagctaatggggcatagagccaccagcaaacacagctagcacctcagggtactttagctttggtgcccctgttccagaaagaaactcaacaggcaagtttttatttgtaaaataagtcacaactgctactgaacacacaaatttgaatttttaaatcaaagtaagtctcctagttgttcaaaaaagtaaagaaggaaaaataaatgaaatccaactaaacactggggttaaatttccatgaacccactttagggaaaacattcccatgcatttataaaattgacaccaccatttctttgtcagtaactgtacataatctacctaatatgtactctacagaacattttactcctgaaatttcctcattctattcataaatttcaaaacttcgtaagattagatagagcaatggttctcaaccagtgttgaaacccctttagagtttgcatatcagatatcctgtgattcataacagtagcaaaattacagttatgaaatagcaatgaaataattttatggttgggggtcactacaacatgaagaactgtgttaaagagtcaacacattaggaaggttgagaacaactgtcctagagggttacattatgaaagattgcacaggaaactctgaaaatccatttacctatcaaaacaactgaacttgacaatactatggggtctgcttggagccaacataactcacacaccaagtaaatgcacagggaacaaatttgttctaatcaagccgctactgatcaatcaggccacagaacagactcaggagctgaactgtgtgacccaagcagactgttacagtgcttttaagccagaaaaccacaaacatctatgccaagttagttacacttttcaccaatcaggattcagggattaaggactttcctaggaacattttcctatgtaccacacttatcatgttttcattggttaacttactcaagtgtggtggggcagcttacccactgtttatgtctcactgtgctaatcccatgtcagtaacccaggaaggtctggggaggtcttgggaactttaactttatttgaccctttttcaaaatgaatgttttattcaaaatggcttcagtttggtttcttctgacaacaacattgagctcaatgatatcaaactctcaatctaagaggaatatttgtaataaccaggaaagggcttgatggagctagtcaattttatcaatttagtgatccatatttggccaactctgtcaagtgtgtctgactggagtaaggtggataatatttgtccccatcactggattgtaggtgttgactgtcacttctgctcaccaaggaggagagagagcatcctaaagaactgaagtagtttctgggtcaagagggttatttttggagactgaacctattcccttgtacctctccttgtaagacttaaagtttaggtaactggctgccaagagaaaagaaactacagtgaatgcagatagaagaagaaatatttcacatgaatagctggaggaaaatttagcaaataaaaaggaaacccaacctctgaaagctggaagaatttgtttttaagggttactacaatatgctaggtggtggtgtcacacacctttaatcctagcactcaggaggcagaggcaggaggatctctttgtgagttcaaggacagcctggtctacagatcaagtttcagaacagggaaaccctgtcttggaaaaaaaaaaaaaaacaaacaaaccaccgccccccaaaagaaaaacagagttaccacaatacaacagtcactaaaatttaaaaccctgatgcacagccacagaaaataaaggatatgtcaaaaattatcactgagtaagtccaaatgttcaaattcttaatcaaaaaatcaacaggcttacatatgttcagtgatctaaaagaaatcacagacctgttattattcaggtgtggtaaggtcaacaggtcaggagacaactgccacagaacagagaatttgtcatttacagtttgtggaggaaggtatacaaatatgccacaccaaaggatgtctcagagtctgtcaggaagcacagaaaggggggggggtgcatgaccctggtttatatggtatcctggctagtttcacatcaacttgacacaagcctagtcacctggaaagagggactatcaactgaaaagatgcctcccctaagactaggctgtaggcaagtccacagcacattttcctaattagtgattgaatgggaaggcccactgcaggcagtgccaccctagggctggtgattgtgcttgctataaggaagcaggaggagcaagccataaggaacagcaagctatactctaccatggctgctgtttcagtttgactccaggttcctgccctgacttccctcagtgatggagagtgacctgagagcagtatctgaaacaaacccttcctctccaatttgctttcggtcctggtgttttatcacagcaacagagaccctatcacacaagggaagaaacaggtaaagcatgtgcgttgccttagttttaacccagcacacaccaacaactgttttccaaagctgttcactgcctaataagtagcagaaagtgactctttaaattcagaaaaatgtcaatttaaaccaaaagctaaaacagtttccgccaaatccttacccacattaggtcacaaacacttgtcaggcgacacaagtcaagacattctgcctttacctctgatgaaaacttaagacaatcacaggctttaaaagtctattgttcataagctttggaatttgtccaactatgtcttttcttgttttgtgtgttatttttgctttcaattaatactgagtttggactgaatcagttttctcaatttctttgagtattttatatatctggagttattctatacaggctatgcagacagaataattcttagccctttcacactcagcactggccctgcaaataaactacaacagagcagtactaatgtgataattcaccaagaatggagcaatcagggctggagagatggctcagctgttaagggcacttgttgctctttcagggagccaagtttcattcccagcatgacatcatggctcgcaactatttataactctagttctggaggatccaatgtctatttctggccttcacaggcaccaggcacatacatggcacacagacaaaataccatatatataaatgaataaaactaaatttttttaaagaactgagcgattttactccacatacattttcaaattctgatacaataaacagtattttaaattttctatttttctattacttccaacgaattagaactaaaatgatgagtaatgacactttctttaggaacttactacataatgcacatttgcctcttaattcaacaataaaaaaaaaatccagacttgaatgctttaaaagcatgacaattttctcatctgttctttttgtttgtttggttttgagacagggtttctctgtgtaacagctctggctatcctggaacttgctctgtaggccatgctgactttgaactcacagagatccatctgcctctgccttccaagtaatggagtaaaggcgtgggccactggcccgcacttaacgctcttttgatgtaagtgtgcactagtaataaacataaaatgtctccacatgtagtcataacttataataatttatagtattctgaacaaaggagaaagcattgagaacatcacatacagttgttgtcagcactactatgctgttgcagcttcaaggagtccagacaagacataatatgtgagcattttattatttgcactgatcatttaaatctacaaaatcgatgtgtagtttatggactatatataacaagcagaatttgttatgtggttgggaagtctactagttctgctacaagaagtactggtacttttggctatctggaacattttcagattagcagcctagtcaacttgaaataccacagactaggaagagtggaaacaggcaggtgagctaatgtactagctaagagaacagtaagatgacagtgatatcattcagtggatgaacacttgcctagcacacacaagactccagtttgctctccagagagtaaacagagtacagagaagagagtacagtaaatataatctaagttccttaaacttattttcttatttctctaacatatattatcagtaggctggagaaggtgtggctcagaaaattacaaagaaagggacacaagtattgttcaggaatggcaggatgtagtaaagtcaacaaagaagatacagtggacacatgagatactctctctctctctctctctctctctctctctctctcgtgaaagactaaataaaatattagaaaatctcatttaaatgcaactttatgacttcttaggtaaataatattaagtttgaaagatctacttactgacactgctatcatggtactatctggcctccattcagcttgtttgtaagatccaaactgagtagatgatttagctggttctttgtacgttacgattaacacagtaggctggaagaaaacaggtttattttattttagttgtataacacacacacacaaaaaaacagatacaaacaaaatttaaacattacttatagaatacattggaaatatttttaaactgtagcataatctaaaatcatccaccttcagcattccatgcaattatgaaaaaagaaaaacaatttgtgattcatacatacatctactgaataagttaaactgagtcaataattaataacttcacaaaatataaccatgcccatatatattcataggtgaattaagccaaatatttaaataaattgtatcagttctctacaaccttccctaagacacaattgataggtggtccttttaaattcattgtttattatagcactatattgcagacaaaaccacatgaaaatcaaaaccaacagactaaaatctctcattgaacttgtatgcaaaaactctcaagatattagcaaattaaatccaacaaaaaatcattccaggcatgcaaggctggctcaacattcaaaagccaactaaataagctaaaaaggaggaaaaatggttatcaataaaggccaggaaaaaaaaaagcatcttaatacgttataacatctattcagagaactccagcttgctaatgaacaactacaaaaatcctacacctatcattacacttactaatgagaaactccaagctttcttacctgaggaacaaggcaaggagacattcattactatccaacatagtagcacaattcctaacaaatgtccaatagctaggtagtagaagatgagtggaacttccggacagagataggaactctgggtagaacagaggtgtgattcaccaccaagacatagatttgggcatacagtatggaggagaagtaacaagtcacatgatagaagacagattaaaatacacaggtcaacttaagatttaagagctagttgggaacgagcctaagctaaggccaagctgtcaaacttagtaagtgtccttgtctttgggagctgtcagtacaaaggaagtatgactacagaattccacaagacaaaaaaagaaaataaaaggtaatacatttcaggaaggaagatattaaattatatgcacagataacagtgacatatatagaatttgaaagaatcaacagcacattctgaaataaataagcaaggcttcaagacacaaaattaatacacaaaagttgatcagtttcatagatcccagtaataaaaagtatgatttataataaaaagcatgtttaaatttatactgttaccccacatgaaacatttagtgtcataaatctaatagaattatgtatataagaaatattacacaaaatactaatgaaagatatccaagaatagatgaagctattctatattaatggttaggaagggtcaatactgttgagatagcaactctacatattcaatgcagtcctagccaaaatcccagctgttttcttcgttagagtttctattgctgttaagagacaccatgaccacagcaattcttatagagaaaacatttaattgggtggttggcttacagtttcagaggtttagtccattattatatcaccaagatagagaacatgacatgcaggcacacctggtggtggctgagagtactacatcatgcaggcaacaagatgccgactgagatacttagcagtattctgagcataggaaacctcaagagaccgacctccacagtgacatacttcctccaacaagttcatacacagtccaacaaagccacatctcctaatagtgccactccctatgagattatgggggccaattacagtcaaactaccacaaatatcagtaaatcaactcaactttagatgagtttcaagacagagtgatgaagagtgttggagtgctaacactgctttcaagacttatcattataaagctatattaagcatgatgaaagattaaaaaaaaaagatcaaagaaacgagaacctagaaagactcacacagtcaactgatctttgacaaaggagcaaaagcaatatagtgctagaataaatggaaattgattttcaaaaatttgtcatgatgcataccttacataattttcaagattcaaaataaataaaaaatcctgtgtaaagtataaaactactagaatataacagtgaaaaaatctagatgacctcagataaggcaatgacctccaccaagggtgcaatatctaaagcaaaagattcataagatgaacttcattaaaattagaaaatgatctatgagaaacactatcaagagaatgaggacagagggcacagagtggggaaagtatttgcaaatacccgataaagaacttttataaaaaataacaaacttaaaattcaataaaaaacaaaataatccaatggacaaagacctcaacaagcatgaaacaaatacacatggaaaacaatctttcaacatactctgtctttagagaaaagtaaatttaaacaatgaggtaccgttaagtaccaattaaaatggtcagaattcagaagattgataccaagtgctagcaaagacataaaacaataggaattcacattttttttgatgttgaaaatgcaaaacaataacttcactttatacaactggctctttcttacaaaaccaaacacactaacccgataagatagtatttactcattacctatccacacaacagtttaaaaagctgagtgtggtggctccctgcatttaggaggctaagaaaaaaggatcatgaatttaagaccagccagggttagtgagattgagactagcttgggctacatagtaagaaagggccgtttaaaatagcaacaacaacaaaagtagaacacaaacattatagtcgtttcataaatattgccacacttggaagtaactatgatatcccttcttcagtaactgatcaactacagcagatccagacaccaagacatggaaagatacggagccttccatgaattattactgaaaaagatgcacattacatgatgcttggaaaaggacagacagaaggttttttgcttttgtttgtttttagtagggattgccagggctgggagacagaaatgagtaggaagaccactgagaattccttactgcagcaatattctgtatattatagtctgaatcataacacccaagatcccgtgtgttttaggcttggttccaagagtgtggtgctattaggaggtatgagaacctttagaaagtagggccttacaaaatgaaattaggcactggggacacacccctgaaaaaggtagtggaacactggtccctcctctctgccccttcttttgcttctgggctgtcatgtattctcatcatcatatactatttctccatagacccaaaagcaacaagccttttgatcatggactgaaacctcctaaacaatgacttaaaacaaacctttccctcttttaagctcattatctcatatcttggagtagtaacaaaagttggctaacaatactgtaatattatacatttcttaaaacccatagaatacaggatgtcaagagagaacactatggtaaatatggacattccctaatgatcactggtcagtgggggaccactgattgtaactaacgcaccactcaagtaagagatgttgatatgaggggtagttactgaaggaagagcaggcaatatgtgagaattctctgttcttgctgctcaatttcattaagaacccaaatctgctttaaaaaaataagtttattttaaaaatagaaccaaaagatttcaatcaatatctattaaaggttaataagatataatactagatggaaattctaactttataaagtttacagcctactctggaaaagcaatgtatgtcagtagggatccaggaagacagagcaacacataaccaaattctacacaatgtgataattactctatctgggcagctcttcagcttctcaaacattttcatattcataacactgtttggtagcaagaaggctttgagtaataaaataatgggaaacataaccaagacagacattgatggaacattttactcaatttgggtaagtagtacacttcaagtcaaagctcaaaatgctcaaatgattctcaagactatagagaaatggcatgactgatgcactggtcatagggaactttttacaaaggtaatgtttacaaaaggctatataaaaaggagtaattaccagaggatctcaaaggtgacaatgatttttcagcctcaacactataaataccaaagtgtagtttgtaaatattttccagtcacatagattcataaaactttgaccaaataataataaattataatgatagtctaaaagtagagtattaaaaatggaaaagtaaaaatattcaagaattcttttccatgaaatgacttcaggtaatggcaaaggaatataattagactaaccctcctgtagacaacaagaaaaatctaagaaataatatttcaaagtactgaaaagcagcctaatgtctcaaaaatgaaaaagtagggactagagagatggctcagcagttaagatcactggctgctcttccagaggtcttgagttcaattcccagcaaccatacggtagttcacaacatctgatgctctcttctggcatgcaggtatacatgcagataaagcacccatacatacaataagcaaatctaaaaacattttttttaatgagaaagtagcttttcttgaaaagggccatgagttacttgtcatgcctaacctcttaagcagttagtgttacaggcctgtactgtgtgcaatgcaccagggctaatatgctttaaatttagttttaaaaacaaagcgtaagtgcaaaacttagaatacaaagcagaagttcaaggaagaaatacacctttctccagaatacagaaaacccaaaagattccataaatacaaaaaagttaaaataagtaaacaaattcagtaatggtataagatacaaaatctatgcataaaacccattatatttctatacagtaaaaacaaactgaaaaaagaacgtaagaatgcaatcctatttataaacagaatttaaatataaaatagcacataaatttaaccatatgacactggaaaccataagacactgaaaataacacaaatggaatgatatctcatgttcatggatggtgaattgatactgtttaaatgtatatactaccaatgcaattcctatcaaagttccagtaatatttttcatagaaatttataaaacatcttaaaatttatacagaactcaagagaccaaatagccaaagcaatcaaaagctaaacttcattcatactacctggttttgaaatatagtatatagagacagtaatcaagacagcatgatacttggataaaaacaaagcacagagaccaatggaacagaagagacgccctagggagaaaccatgcaccctacccctccctatgcctctccaaccccacacatggtcacctaatctttgacaaagactctaagattgaacaaaagggaaaccagccttttcaacaagtggtgctgggaaaaccagacatccaaatggaaaagaataaaacacccataaccaaagaccaactcagggcaaactagagacttaaacacagggtcagaaacaatcaatttccagatgaaaatggaggaaaagctccctgatactggtcttggtaaagagttctggatagcaccaaaatcaaagaaacaaagcaataaacagtgggactacatgaacctaaaaagtcccaaccagcaagggaaacactcaatacaatgaagaaaatcagtgcaaagggagaaaatacaaacctagcacatatacaagacacttaagcaattcttaaagttaacaacaaaaagaaaagcaatttcaatcagcaacagacctgaactgacatttttcccccacaaaagacattaaaaacagccagtaagccagcagttactcagtattgctaattagcagggaaatgcatatcaaatccataagatagtgctctgtacttattaggatggttttcatcaagaaatcaagtgataaaatgtgggagaggatacataaaagggatattcttgaaactgttggtaggactgtaattgatatgtcaattatggaaaatggtatggagcactctttacaaatttttaagagaaccacatagtttagtaatctgtctgtctgtctgtctgtctgtctgtctgtctatctgggtgtgcacttgtgctccccatcccccaaaatggtattactccgagtatgtacaaaaaaggatttgaaatcaatattttaaaagttatctgcatgcccataatcactacggcattattcaaaatcaccataatgtgagagcaacctaagtgattgtcaacagatgaactaataaaggaaatgtggtatatatacaataggctattcaatttttttttaaaaaggaaatcctgacatttagtgcaacatggatgaacttttaatgaaataagccacagaatagcatatactacataagctactctatatgtaaaacctaacttcacagaaaccaagagtagaacagagattgcccgaagttggaggtggaggagacggggtgatttgggtcaaattcaaatacacagttataagactagtcaattttcgtgatttaactcagagtccggtaacttcagatgataatattatatacttgaaatttgctcagaacagatttttacatttattattgcaatataatagtgcaatatgtgtgttgtggtgatgagaaggtatatatgtgccacaatgtgtgtgtagagtgaagtgcttatataattattctttatcaataaaaattgggactcgggtttgggggtaagaacctgaatgatcagaaaatcagtggagaagccaccagtgacctcctctctcttttgttcctcaatccaaaaggactgagatcctctctaagctcccccttactacttcctgtctcctcagtccttcaagacctctatggttaattttggtcagctaatgtctagctctgccctctgacacaaagcaaactttattgtaagaatttgatcaaaatatcacacaatagtggagatcagtggacaactgccaagagattttgtgtatgagtgtttgtccgcatgtatgtttatacaccctgtaaccatagaggccagaaaagggcatcagattctccaaaattagagttacatcaagttgtcagccagcatgtgaactgaacctgggtcctctccaagagcagtaagtgctcttaactatagtgagatatccacccagcccacacctgtagcgggtatggtcaaaggcgaggagggacgtgatggtgggtaggattaggtctggggtcccggaccccagtgctctctcttgcctcctgtcgggtctcagagggcagcctggatgaaccctttgatctggaacttgtggcagccacctgcttcttacgtaagggcattctcccaagtaaacttcacttaacctgtactgagtctagtgaatcttgattcccacgaaacacttaaccactaagctatctctatagcctgagaatagatctcaagcaatttcataaaggaactatgtgaggtgtggacatgcttattagcttgattatatgttgtaggacaatgctcttgtacattgttaagatttgttattcatattggtttaataaatgctgattggccagtagccagacaggaagtacagatggggcaatctggttagattagtagaattctgggaagaggaaaggcagagacacaatcaccagccagacacagaggaaggaaaatgcctttctgagaaaaggtaccaagccatgtggctaaacatagataagaatcatgggttaagttgtaagagctagttagtaataagcctgagcaagaggccaaacagtttataattaatataagcctctgtttacttgggactgaatagctgtggaaccaggcaggatagaaactaccatctacaattacatctatcaatatacatatatatataaaaacattttgccatacatcataagtattacaattttgtcatatatagttcaataaagctagaaggaaaaaaccaaaaacagtagttcatcagcaatgaacacttccagttatggtaggtaaacaatgactcatggagaaagaaggattacaacagaagctaaaggataggtaatatactaataatcagagatgaggcaatagagcattccaggatacgagtgtttctgatatcaaactaaggagtttgaactttactctttaacaaaaagtgaactctagaagactttcagacatgtaaatttaaaaggaaggtctctggagacagtaatagagctgaaacagtgaaatgggaacattaggaaaaaggagatagaggttaaacagctttcccgaggatgtgtagctaattatacagcttggttcttgagacatctatctcactgtgttttccatgtgcgcaattatcaaggacttttcactattagctcacatcaacaggaatgtaagtttttgctaagagttcctcaatacattatttatataacagtagctagcgcattgccaatttcagctttttatttgcaacccacagtgataactcaaaagactttcattctctgggtgtgatggtgagatccaggtcagtcagtgatacagtaagacctagtgtcaaacaaacaaacaaacaacaaaaagccagctttcatgcatcatactaacacatagcattgggcagaatgttttctatatataataagcttcttcgtcacttccatgctctgcctatttacgctatcctttacaattagtattcaaaaacacttctctgaaaacaatttaaatatttgaaatcagtgacctgcaaattgagatgagtatgtatgtaattcagaatggaagtgtcctaaatatttcaaggttaacacccacagacttagctaaggagtctattaaaggaatatccacagcccctgttacactacaaaatgcagttcatctcacacaatcatcaatcatgaatcatatcttactatatagagcagctccatcaaccaagctgagttcttctacaatactcctgctggaaatacatcatcccatggatactacctctaccacctcatcctaacacatatacgaaatctttcttttttcttccctttctccttccttccaatccttccctccctccctttccttgacaaggtcttactctagtccaggctgatctaaaacttactaggtagcacaggctggcctcaaattcatagcaattttcctgcctcatcctcatcaaatctcaagtgctaggattacaggagtgagccaccaagccatgcatttagggctccaaaaactgtggataataaataccattacagatttcagaaggtatttgtttagtgggggtttgtgtggatgtggaaatgcacgtgctatgtcacaagcatgaaggcaagaatgacctgcaggactcagttctctcctttcgttatgcaggtcatcagggctggcagcacttcccctcccccttcccctccccaaccatgcagaccctggactagtttttagaattccgaattgcaatcacaatgttaaaaaaagcaaacctctactgatacatcacaatgaaaaccaagtaataaacacaatttattgatgaaaagtgctattttaaagtctttgtcaagaagtcaaatgagtatagaaacatttgttcatagacaagtccaagcaacactaacatgtattattcaaatttggttagaaaattagtctgaacagatagaactctaaaatactgtaatttccaaatagcaacttagtacataataatgggatatataagagggccacaaaagtttactagaagacccataaaatgtacttagttttagatatttagtttaatgttcccatagtttcagagttaaccaacattccatgtacagcaactttttgggacattcagacaaccaactttgactaaacacacacttcttccataaagctagttttctcgtttaaaactgcattttccctatgtaggcttactttattgagtccaaacaaaatttctaaaagcaaaatctatttattctctcttctcttttgagtctctctcactgcctccaaatattctaaagtagcttttgaacacttcaactctatagaaccctgtggaccttcaaaatgtattacaaccttccaaaaaaataaataaaatcaataccgtcactcatatgctcagtgaagacaatttaaaccaattcattccaaactaggagtgtaactgatagcctccatttagctagagatacttttaccattttgtaacctaagcttattttaacatacactgttttgcaatgtttaggaatgagaaaattaaaatgaacacctcacaggataagaagacacttacatcccaagaggagaagccttggaaggtgaagcctgcctcttgttcccactcacctggccatatatcacagacctcagaattgtcacatttaaacctgatttttgtaagtcacaaagcttaaagcttatgctcacagttccatgtaaaccctgagtgccatgcagcctccctaaggtagtccagaaatctctctcactccatgcctctgaacccatatattttcccaaatctaacttttgaaaatttatttcactgtgtgtgatgtactgttttgtatctgtgcaaaattctaagttttacacactagagatcagtagtaaccaatgtacttctgtgaaacacagctgtgtgtagaatgggagttgaaggaaaggagtagagacatttaaatgccgtaatactgaatctagccccgaatccaaacagattatattaatattcaaaatgtgcctaaaatgtctctggggtcaggcagtggtggctcactctttaatcctagcattcgggaggcagagataggcagatctctgtgagttcgagaccagcctggtctacagagctagttccaggacagcctccaaagccacagagaaaccctgtcttgaaaaccaaaaattaaataaataaacaaatataaaaatgtcactgggacacattttaatgttcttttttgtgtgggggaacaagataatttgcagacttctgctctatcatggtacttacataactctaatttttatctttaaaggttaaaaatgtaaaatgttaggttttacaatgtgttacgttcaaataaaactactaaagttagaaaacaacataaaactcaagttctaattatgcttttccacataaagttacacctaactaaaatttgttcacctgccacatatgctgacaacgcatcccattaggtaccaactacaacacatatatttaaaaagcaaaataagcacataactgagtatcatattgctgatactgtaatgatttagtcgcctgctgtgttctgatacctttctgaaaattaggtcagccaaaacctagtgacaaatagtgtgatctacagcctaactatgtaatagttaaaagagaaaccaaaattacctaaatcctagcactggttttaccacagctgtgtgagggcaatcaagggcattatcagcattccaatgataacaagcagaaacccaaaggatttaactaaaccaaaaccagtttttcatagatatagcaagaacaaggtcaaccaaccttcgatctcttcctatgagaacaccactctgaaatcgattggtactgtctctttgaatgggaagggggcaactttaaacttaagaattctgtaattttttacagacggatctccaacaagcagtcatgtccgatcgggggctatcccactcaccatctccttttcaagttatttctcctatcaactcggaactcaagacacaaggaggaaaaggccgggagtcaaagcaaagaattctgccccacgctctctctccaagccttattatttccaggtgcggcgcagacagatgtgaattcctccactcttaaccccatcccccccaacagttctcgggagtccaagagcagcaaagaataggagagaaagacaagagtccgtgatgtttgcaggagacagggagctaagttagcaggcctctagaaacgaccaactcctaagtttttagaagtcagttacagcagcctgacactgggtaaaaagaccaacaggctttccggaactccaaacaacgacctttacagcgagggggagccgggccgccgcagccgccggagcgctgggcagcgaggcaggcaagtccggactcagccagggagctgccggcccggcgcgcggctgtgggcgccacgcggggactcggggctgtggagactcagcccgcgcgaggcgccaacccgagggcgagagggactgagagcagggggagtcgctccgggacctgggcgctcgggagtccagacacgctcggggcgggagtcgggactgggccggggtcgctcgagggaagtcgggacggggccgagatcgttcgggggaagtcgggaccgggccggggtcgctcgggggaagtcgggacggggccgggatcgttcgggggaagtcgggaccgggccggggtcgctcgggggaagtcgggacggggccggggtcgttcgggggaagtcgggacggggccggagtcgctcggaggaagtcgggaaggggccgggatcgttcgggggaagtcgggacggggccggggtcgctcgggggaagtcgggacggggccggggtcgctcggagtgagtcgggaccgggccagagtcgttcgggaggaggtcgggccggggccggggtcgttcggggagagtcgggattagatccaggcctctgtgggggaagtcgggacgggacgggggccgctcgggggaagtcgggacgggacggcggcgcctactcactcggctgtaccagatgctgaggcgggccggggccagcacggcaaagaacgctctccgagggtcggactggacgtggagcggcgcctcggccgggctccgcggcgcgcagagcagcctcttgggccagccgctcaggaaatacatggtccgcgcgcggccccgacagcccccggcggccccggccgcgtctgtcacgctcggcggccccgggccaggtgcccacctcccacaccgccaccggccgagtcggcggcggcgacagcggcaactcggggcatctgcccgggggccgggcgggccgggccgacgcgatgctgcgcgacgcagtctcgggcgctgacgggccgagggtgggggaggcgggaggccagtgggcccgcggcggaggagcccaggccggcccgcccgctcgccgctcgccgctcgcgtcagcacgccgcacggcgcaggcaggctcccgaggctccgcccggtcctctcaggccgccgcgcgtcagcacgcaggtcgccgggctggacgccggctgttcggtgcgtcttgctgacgacccggagcgtggggctggggaccggcgagaggcgacagagcccagtcagtgacagtccgggcggccaggcccacttggacttcccctcgattggcacgagctccggggcttgcggggggggggggggcgggaggagcgagcgtcacgtgacatccaggctgagcttggccctgggtctctgcggttccaaggctggtgggggttctgtacccagagatcttttgtgtgctgcggtttgaagcgagagagctggtgatgttcctgcccttacggagcttgcattctaggcaggatcattttattcagccgccaaactgcggagccaaaaagtgcttctaaatctagcaacagtatatagttctaatccagtttgcatccgtctgcccctctaccagctagagtgctagacaaagcccagatggtgtcttttgcacccccagtaaatcgtgttcaggaaaagaattggacttattttctgagttgggccagactggagataactgtatcggggtattcaacttttggggggtgtttaactttgggacctttgaagccttaaaaatagctacagcttttagcagattgacccggtaaccccttgagtgcatgaaggtaaaggcaggaagtagagttagggggaaggggtctgttcgtgttcacctttcatcttttgaggttacttttctcaagcaagtgttaactaaggtttaaacgtagcaaacagtaaaacaaagtaacagtccggattttaaaacaagcaatgtaactttcactaattgttttaacacttgctgcttttcatagaagttgaccaaagacatgaccgctgctcaccagccttttgtgccggtagagtctccctaaggtttccttcctggtgtgtcccacccacaacacagcatgcctggaatgtctttagcgtagcaaacctaaaaaaatattttttcagatgaaagtgtgggtgaaatcttgatctttcgaagttacaccgttggacaaataggtccagagaggtctgccttaccaatataaaattgtagaacttggttgtctagaactttttagaacacatggcagatagaaaatgtgtggcaattccattcagaatatttgctctacctctgcttcagacagtgtgttcatgtgcctcacccgtgttgctgtctccagcaatcatggataatttagaaatttctaagtaatttctctgtactgctttggaggctgtcctggctggcctcgaactcacagagatctgcctgcctctgcctcccgagtgctgggataaaggcgtgtgccaccatcccccggtgttacttcttagttttgactttacttgccagctccagtattggagccccctgttgtgatcttttgtgatgactaaggtttataaaataatttaaggggtgatttgatttaatttcacagaacagcttcaaagcccatcatcatgttgctgtatcattgctattcttttcttaagaggacatggcaccaaagtggtggatgtggcctaagtcacatggacagctcttccttccaaagacccagtgatctggttcggtcagattgaagtgaattgtgatagtggcctgaacataggcaagaggaggagaccctttaggcctttctcccttgggagtgatagggtaaaatatctcactctaaaactccttaagttttactcattgtgacagaattaactttcagataccatattttaacattgtaaaatatactaagaattccagtgctcaagtcttctgttcctgattctttctcctaccattaccattctagtcaaacaatctggactaccctgagccaggagtaaactgataaaagttggtgggtacatacttgattctatcaaatttaacaaattccatattattgataagggtgcttggaaacaagtacatttataaactgttggaggataatttggaacagtgtctataaagaccattgcatgttgtgtgtatggagaaagagacagacacccagaccctattgtttcttttctataattattttctaaggaagcatacagacttttagccttaaaatatatcccgtaaggcaggaatgatagatgcctatagtgatgactattcttggttgtcagcttgactacatctggaattaactaaaacctaagtggctgggtgcatatgtgagggatttttttcttgattaaatcattgcagtaggaagatccacatccaatctgcatcttcagggtagggagaactacccttaatgtaggctacatcttcagctggcagcctataaaaaggacatggaagaaggcaattcttgctctttgcctgtttgttcttgctctagcttgcatactccattccttcactgaattagagcctccttcttccggactctgatgtatactggagaccagatgagacatccagccttgtgtactgaacaactactggagttttagatcctccattggtagatagctattgttggactagctgcaccacagcctgtaagccattgtaataaatcccagatagatagataatcattctatatattctgttcctctagagaaccctgactaatatacctgtaatcccagcacttgagaggtggagacaaatatgagttccaagcctagcctgacctacataaggccctaccttaaatcacacacacacacacacacacacacacacacacacacacacttgaatagaattgtctaaacttataatgaaatattttgtaaaaacaaatacgttagagaatatttgttataaaagtatgaagtaatgaaaatggtttacacacatcaactattccatgcttatgaagaaacacatgtttaacaaaagaaaagaaaaaagtaccaaaatattgatatttaaaaagccctttaagtagagtacttaatatgttttctttgggctttttttgtactttctaaattatgtttaaagaattcatcttacttttgtaacaagactatttattaaacagtaaccttgttaatggttacaatgcctcagttgtcctgcttcaagtagggctgtgcaccacttgcaaatcaaagacaatactatggtaatgtagagtttcaggcctggcctcaggaatagtgagagaaggcttaggagaaaataaccaccaggctaaaagtaggctctgtctatttgcatacagtcacaggtttctgagactaagccacagctggatttcagttctgagtatgccacttctaatatctggggaccctgtataagagcctatgatgataagcactgatgaggatgtttcagtttgcgactcttcattatgcttttatcatctgctttattatacttgtatcatgtgcctttgcttctgggatggagtcctggttatttatactttctgcaaactgataatgaataactgagctgtgttttgctttaaaataatactgaagtaatcagggaatatatagatggccataggttgataaactttcaggccaagtgaggaattcttgggaattcattatgttatttcctccactttagctttcaaaatttccagagatttaactgaaaatattacagcatagtagaaagactcagactcaacatggagctttgaaattaattctggctgcaggctgaataacttgtctgaacagaccaccaaaggccaaaagcttccctgtttactgctctagttggcagtgtgaacctgggagagcagggcctaaaaatgaggtggactaaagtctcaggcaaagccaactttattcagagcatcaggcaatttatcctcagggataggaagactcacgtaagtattcaatcacacaagctacacgtgccaaaaccatgtttttccataaaggcatatgaataaacaacagctgaagtaaactcgctgttatccgctacacctggggagcacaaaaacacattctaagaacaattctgtgttgaagaaactgaggtcacagactccttatttttcttggagttctctcacaagagatcagaattctcacaggactcaattcttgaacagtgttttgacatctccaccttttttattttttaatagcataccatgatcaacctaattgtcatttgatgcgtgagtatcttataagtaagcaaattatagtattagaacagtgaaagcatgtgtctaatactctgacaccaagaacagagatccaaactttgtccagtactattagttgctattattatattgatcagaaaaatatagaaaatagcttgaaaagagaccacatgattagtagttttagtattttgtagaacataagcccacatttgccttcaataggaatacaaatgttatcatgtcctatgcaaatgaagttatttaaatcccatggaaaattaaatgcagtcctgtcatcagatggacgaatgagtctattatggtcccaaggtccattcataaacagagtaaattaacttctcccttggtgcacagggacttaacttggccccaagcaaggaacttgacttctgatgatatggttgatatttccttttgccctttagttggaggtctgctatcttttggctgacttccattgtttcctcaccatccactattgtccttgatggcctgggcccaaaggagtcagaggaatccataatatttcagtaggatccatctgcaatgacagacacatggcccttccctttacttctggagaagtaaaactggggcaggttaatacatcagcttgcttatttccttctgcataaaaccaggatatgcacaaatacgagtatatttctattgctggaaataatcttacaacataagcagaatctgaaatgatatttaagggttcatgaatgacccataatagattaatcaaaacagccagttccacctgttgggctgaagaaaaagaagtattaatagatttatgaacatctggaccatgaatccttcctataccattagatgagccattaataaaataagtatctgcctgtggaatgggggaaggttggacaatttttgtgatcacaaattcagttgtgaggaaatcacatagtttcccagctgggtaatgatttcatatccttcatagtaatttacaaatgaaattagaaaatccatggagttctgtaatgctcttaaaaattgattgttagggataatacagcacaataaggatcaaacttatgtaattgttgacatcaggtcctcccctgcttcactaattgagcaagagtggctagcgactaaccattcatcctgagactaactctcagactgaatgcctctaccttttatacctctaaagtcctgggattaaaggcgtgagctctgattcattctctggtagcccaagatggtcttgaacttagagatccatctgcctttttcctgagtcctggaattaaaagtgtgtgccaccactgtttagtttctatagctaactagtatagcaggctttacaaactgatctccagtggctttattgaatcataaacaatatatcaccacatagatccattttaaaagtttattctcttgtactgtaatgcctgtgggagacactttagtggggaaaataagtaagtttaaaagcaggaaggatccactcaatacacaaatcttttactctgaattcaaatagctgtagttcttttcttcctctcaagatgataagctaggactgtctagcactgtttttccttctagagttttaagattagtacatataaacattttgattttgctgaaatggcactggaaataccagtcgtacctcatgagtccaggggggatttgctaaaatgaatttcatttcccagtcgtgctttgcctaggttgtaaagttagctttttcataggctctcctaagacctcataaaaaaagtggagagaattcagtattagattatctaatcctagtcccatgcttcagggtcattttcaaataatagagaatacatatttaaaggagatctcagtaagggagctgaggaaccatcggtagcataggtggtggcaccatcactacttttgacttttgcctgcataggaaaaccctcctttgtctctcttaccagttttaaggtttgatcattcagtttatagtcaaagaattggccatctcttcctcctggttagtattctccaggtcctcaagtatcttacaacagttcaaatccatgcccagaactgaacagggatcattcccccttgttattgctgcctcttcaatatcctttcggactctgtccatgcttcttcatttaacattccttctggaaaccaggactttatacttatgctcctccttcctttcaaaatgatgtacaagctcgacatacagtaaagccccattatcctcacctccttgggtgagggtcactactcttatctcatagcggacttcaggtacttgattctcggagccacttgtttaccatgggaggcaccaggaacataactgtcctcctcctacagtgtgtcagggctagtgacatccctcacctcatctgtctcaatctgcttcattagacacacatagcacaatcttgccgtttcttaaaacttcttgctgggcacaatagtaatttctttacatgcacggttgttcaggaggaagtcatgcccagcgatcacctggctcctcctccaggatgctaatggagggaatgttggcagattggtggtaaaagtgaaaatgttgatatgaaacattatacatgtaactggtatgctactaataaatctatcgtgtccacatttctcacaaatcacagttaaatattacttggaacctctaatgtaccataaaggcaggaaagcttattattaataaatcttaatgggtgcaaatgagatttctggggtgggacatcagcacaaagtagaaaatgaagtgaagaagctattgtttctcctagccaagtgaagggagagttacaaccccctccccacacacacacagacacacttttggtcctttgtttatttgtgacaaggtcttgctatgtagcctgggctatcctcaaattcactctattcctgtgtccagttcccaaggactgactacaggatccagataccacatcctgcttttttttatactgaaagaaaaactagttggtaacatatttagtcattaacaacaattattctgtttgcccatgtctcaaccagttctcaagtctagcaaaatgtcggacttgaatattacgtgtattctttattaaaaaaagaaaaaaggaagggcatgttgtttacccttttcttagtcactgttctattgctatgcagagacaccctgaacaaggcaacttataaagaaagcatttaattgggggctggcttacagttccagagggtgagttcatgatcatcatggtagcaggcagatagaagacatggtgctggttggcaagtacttacatgttgaaaccacaaccacaacacagtcataaggcagagagagagagagagagagagagagagagagagagagagagagagagaactgaaatggtgtgacctttggaaacataaaagcccacccccagtgacacatctccaacaaaaccacaccatctaatccttcccaaatagtccaaccaactagggtccaagcagtcaaaagtcaaacatatgagcctatgggggccattcttattcaaaccacctgtaacagggaagttcaccataattctattgttagacccccgaaaactcaagtattcggggtcccaggccacgttcgaggtcaccccaatcaccaagcagattcgagagcttgctgcaaactgcatgaggctttattgtaatttaacgagctaaccccatgttagctcgggtctttcacccacccgccatggcggacggctagaaaagagacggctccttgggtctcccaaaagatcttatagggcagcgtaaggggagtgtctaggggtacgcacaggcttacgcacaggctcacgattggtgtgcttccaggcttggagggcttgccctgtgttgattggtcaactggttgctatggctcataggccctcccagggcctctacgtcattgttgtgcgcttgtccgtaaagcacacccagggtcgtaaagcatagcgccaccagctaacttccgattggctccttgtcacgagacaggcatctgactttctagtgactaacttctgatgggttccttgtcacgagacaggcatctgacctctaagtgaccaaggcaggtttatggcaagcacgtgttcggctgttatggctgccaaaagggaagccggttccttcactatcagacaccactcttggtctcttctctgcctctttattcaaccaaaattatgcatccactgtgttatgcatgtatcacttagggtaaatataatatctacttttagcaagccattctgtaatgttaggagttctgctcttatcagttgtgtttatattttctaggagtgaaatgggaggaaatgggcctttgagaatcacagacattcttgtctcaggtatgcttaattcagggactaggtaaggtgctgctaggcttttgtggtcactaagcctccatgagtcatcgactaggtgttttgtctggagaactcaaagattgaatttcacagggtaaattttggaaaaggggagttactgtagagagaaagcttaaagagaacaaatgcagagaggaagtgggcagagctcctgcttgatggaaggggtcttaagagaaggctgctgctaacaggttttgttgagaggttaatagggcttctcatggaggaagtgagttggctttcgaaatgactgggctgagatgggggaggtgagctggttagtcagattatctaatcacagatcccccacgaggtgtctttgtgcttctctatcccagtaactggactggggttcttgtaaacacctccaaggaccaacgaagtacctaagagtgcagagcttccaggcagttcatttggttgctgtactaaagaagaaagacaaacaaaaatccaaggacacaaaccagtatgtgtggccaatacattgttttttggcggggacagagctgtcaatattaccaaggatgctcctgaccgcagcaggatggcttgtttgcaaggcctctttcccttgactatctagcaagtttctttgcccctgctttcatcactgggtttaatatgattattcagtaattataaatcccaagaagtacaattctagaaatacatagttcttatgaaaaaattggaatagaccatctcataacagtgttagacccctggaaaattcaggtatccggggtcccaggccatgaccgtggtcaccccaatcaccaggcggattcgagagcttgatgcaaactgcacgaggctttattgtaatttaacgagctaaccccatgttagcttgggtctttcacccacccgccatggcagatggcttgcaaaagacaactcctagggcctcccaagagatcttatagggcagcgtaaggggcgtgtctaggggtacgcacaggctcactattggtgtgcctccagccttggagggcttgccctatgttgattggtcaactggttgttatggcccataggccctcccagggtggttgctatgctctgcatcattgctgtgtgcttgtccataaagtacacccagggtctaaagcatagcatcatcagctaagttctgattggttccttgtcacgaggcaggcacctaacctctagtgactaagacaaggtcatagggcacatgttactgtcatggctgccgaaatggggatctggtcccttcaacagtaattgtatgtcatgttttataacatccaagatgtaaagtgaccactatgttcttttaagatcactacttttagttacttacagttttattgtaaataaactaaaaaaatacttaagaaggtagatatactgctgtatacctgtaattgagcactttagagactgaggcaagaggacagaaattccaggccagtctctgctatgtagcaagatcctgtctccaaaataatgatagcaataaataaatttactgtactttttaagtgtacagttcagtaatgcaaatatgtttatactttgaaacatctccagaaccttttcatcttacaaaaccaaaaaccatattcactaaacaaaaatctcatttttctccttcccaagaccttctcaaccaccattctgttatctgtttttcatgaatttgtgtacttacttggtataaatagaaacctataatatttgcctttttgtaattagcttatttcacttaccataatgtctcagccatgtacctgtgacaagttatcttttgctttttaaagcctaataatatttcctcctgtgttaatgccacattttattaacacatccatccatccctgaatttttgcattcctcccacctctagttactgtgaagaatgccatgaacaagtatgcaaatatctctgagattctgatttcatgtcctttgaacatatacccagaccatatggatagttctacctttattttttaaggaagcaccattctgttttttcatgacattgtgttgttttacaatcccatcaacagtgctggggaaaggggtattgagatatttcacattctcatcagcagttttttgcttttatctctctctctctctctctctctctctctctctctctctctctctcgtgtgtgtgtgtgtgtgtgtgtgtgtgtgtgtgtgtgtgtgtgtgtgtgtgtattctgtatgtatctgtgtacacacgcagaaagaggacagagagtcatgctctattgctcctattttctgagacagggtctctcactgaacttggagctcactgtacccagtttttatgtgggtgtttggatcagagtcaggtcctcacactgctcagcaggcactttgcccactgaaccatctccctagcccccagatttatatttaatagtggccatcctactagtataaaataatatccttgtgttttatttgtgaatctctggtggctactgatgttggacatcaattttatgtgtttgtcagccaatttagaaaaatgttattagagttcaacataaataatgatttattaaaaaaaaataagccacaatagtggtcctccagaactatggtggagctgaggagttcctatcacatagtggcatggtaatcattgtgtacatggtgtttacttgagggtctgagttggtggtgtatacaaatttgtgttcatggttgcttataaaagtatagcacttatactatgtaccaagtataatcttggtaattataataacaatgtttcttgtttgttacctactgtcttagtttgggtttctattgctgtggagagacaccatgaccacagcaactgttacaaaggaaaacatttaattaaggtggtaacttataatttaaaggttcagtccattatcatcatggtagggagcatggtggcatgcaggcagacatggtgctggctacatcttgatcagaaggcaacaggaagtggactgagtatcacactccctccaacaaggcatacctactccaaacaaggtcatacctactaatactgccacttcctttaggggccatttcctttcaaaccaccacacttactatatactttcttatttgattagagtatactccctctgcctattaaaaagattctacaaagcattatgctgtgttctgccagcaacagcctcacatgttttctgtttaccctgtattttgattttatcaaagcccacatgaacagaatgatctgtaccatctagatttatgtaagcacattccacagtgtctccacaacaatgtgaactatggctattatctctgatagcctgtgacattagaaaactggcataaaatgtcacagggcatgagagaacctctgagtttacattccagagaatgtaattttatattcttcaccaagtttgaaggtagtgcaagttatttgatatactaataatcttacagttaccatcctctgctgcttttcaccttattttctgagacagggtctctctgtgtagccctggttagctcagaacctgctatgtagaccaggctggctccaactcacagagatctacctgtctgcctttggagcaccatgattaaaagtatgtgccaacaatacttatgatttataatcaaagagttggatgactcttacaaatgtgacttcttagaacagatgttggatattagagtcaatttacattcacttcagacataaaaagaatcacttataaaaacccaaagaattgacataagtggaatatatctctaaaactgaacgtccaatatattttattctaagtacttaaaggaaatgtgggcaaatagttgacagtgtcccacaaagacatagttactgtcctcgttggcattttttaaaaatattgaagagacaactgtcaaaatatttacaatcatgtttctaaaaagtattaactatgatttttaattttatatttggaacatctcctatgtgtttttaaatcagcaggatagtaaatattatttaaagatgccttgtttcctgtgaaggagagagtggtcacctgcatctgcattatctgcagatgccttaagtgttcaggttccctggctaaatcccatactgtatgtctcggtaatctcagagaattgggattataaacagataccctagatgattcttctataacaaagaaaaaatagtaagtatggcaggactccttccatggttttattttgactagggagagggaaacacatgggttcagaccagccatgtgtgaactagaaaaggaaattggtcattgctgatgtaaacttgtcattaaatccatgtcccttagtgatcaagcagataaaaccagttcaccatttaatgaatgcttcaaaaaacagtaagtggttatccagttttctctcaagtgaaaacacatattgcataaaatgtggtaaacacactggcaaccgtctagactccaagaatggggcttaggtgataagctactcagagttttagttcaaagtagcctgttatttctcatgcagttccctcttgtggctaatagatgtagggaaaaaaaaagctacttctatggctaactaaggcacagtcactccggggagctctgggtaccaatggagaactcattcttatatacccaaaggatgcacatttatacaacaagggtatctgttcaactatgttcatagcagcattatttgtaatagccagaacctggagcaacctagatgcccctcaactgaagaatggatacagaaaatgtggtacatttacacaatggtgtactactcagtgggaaaaaaaacaatggactcttgaaatttgcaggcaaatggatgaaactataagaaaccattctaggtgaggtaacccagtcacagaaagacaaacatggtatgtactcactcatatatggatattagaaatagagaaaaggattaacagcctacaatccacactgccagagaagctagaaaacaaggaggacagtaagagagacatacatggtcccccagagaaggggaaagggacaagagcctctgaacaaatggggagcatggggggaaggggaaggtaggagatagaggaggggagaagaggaaaggtgaggagaacatgagggttcaggaagattgagtggggagacgaacagaggagagcaagaaaagagacacatcaatagagggagccactataggtctaaagagaaatctgtcactagggaattgtacagagatccacaaggatgaccccaactaggaccctaagcaatagtggagaggctaccttaaatgtccttcccctataatgagaatgatgactaacttaaatgccatcctagagcttccattcagtaactgatggaagcagaagcagagatccacagctaagcactgagccaaactcctggaatccggtttcagagagggaggagtgatgaacaaaggggtcaagaccatgctgagaaaacccacggaaacacctgaactgagcaagtgggagttcatggtccccagtctgacagttggggaaccaacataggaccaaaccaggccctctgaacgtgggtgtcaggagcactgggcagtctatgggacctctggcggtggaaccaggatgcatccctagtgcacaaatggactttgggagcccatttcccatggagggatactctcttagcctagatacacaggggagggcttaggccctccccaaatgacttgatgatccctcattggaggcctcatcctccctggggagtggatgggggatgggatggggggagttgttggggggcatgggaggatgggaggaagagggaactaggatttatatgtaaaaatgagattgtttctaatttaaataaaatttataaagaaaacaaaataaaaaacgcaaaacaacaacaaaagaatatcaatacaccaagtgatactagtcattggttaggggtactttggggaggctttatatctctgcacacacatgcccacagctggagctctggttaactcataaagccattagagtaaggtgcagctgctggcagctggaaaggcccaaggaggcatgagtaagacaactatctagtacactggtatctgacatcaagtacactgagacccattatcaaaagtcagggctcatgaactccggaatataaaaggctctagggacatagcctaggttcttggacctattgctcagtggaagaacagttgcctagcctgcggaaggccctgagtttgatccccagcctactaaacaaaaaccaaaagcaacaacagaaacaaaatctagattcttaatctaaggttcaacattccatacaggatttttttaaaacagggattaaacaatgtaattcatgtataagtacttggaattacaaatccctccaaaagctagcactcatgctattttaatatgtcacaacacagagacataaagctgaatgggacctaccgtgttcatgctttgccacactgccccccaggggatcagagatggaatcctgctgctggtgtattttttacagtggcatcaatgagcagaactatgccatccctgggtcttggtccaagaaagtcttcttgaataagtggctagaagcccttgaattgtaaccaacagagcagacagtggccccaagcttcctgaggctctacagatgtccagatctcccaaggatggtgtagcttctggatggctccattcactgagccagcttacctctcctctcagagagttttaaagtttgttttatgtttgtgagagaaagaatagggaagaaagaagttgtacttcatcctttgtaacacagtccagcacaaacacaaccacctttcaataagtaagaatttagaattcctcaattgaaatgaaattacacagttagaatactccaggcattttcccccatcttctccgtcagtgaagaccagacttctggaaaactcaagacacaatatgaaagctgggtatgtttgcttaggttttggtgtgctgttcaacatctctacttatctgaccattggaatagatttggaaagagattataaaaagcatgaaaagtggtcatgctgtcatgtaaacctacaacaaaacttagggaaagttattttccaaaagaagaaagcaccaacttttcaattttctaagattgaagggacccaaatacttcggggtgcacctctttggaccccgattaggcacagaccacacccaaataccagtttccaagcacaaaccacacacaaagagatcctttattaggcaaggcaaagagacaaggtggctggcgcattgagtaatacatgtcagggcaatgtggtgtattataatccgtcactatcatgaggattctaatttcagttttgctttcttgtttggttttgggtctcttgtggcccaggtgaccttgaacctgatcctcttacttctgcctcttaagctttgggattccaagcttacatgaccatccctggaaaaatgttgcctttcttaataaaaataaactcttttccaaagtggcactagaaagaaaattgctacatagaaaggaactggatcttacatttccctagattgagggcgtggcttcctaagcacagccaatagacagatccgctccctgagcactttctgacaaagtgcgcccgaccgccttatagctaaggtacacagatcttgatgagtaagtccacaggtctcgactccagaggctaaatgtcggaagtgaaagcagtcctgtgagatgctgctgatgggcagcactgatgttgctttgctgggcaagcttgtgtctccgttgaggtctgcgctaaacagcagtaagatagtataacccactaagtatagtattcataaaagtaagcctgagaaatcattttattgtaagtcatcttaaaaattgagtcaaaatcaattaaaaagtgacaaaattcttaaaaatgaaaaaaattaataaatcatttctgcaaacacagagaaagaggcagagacagtggaattgcaagcaatcccaggccttccctgctaagaacacttagtgcttttacagaggactgggtttggttcccagaatgcttgtagagcagctctcaatggcctggagcttcagctccaggggatgtgacaccctcttgtagcttctgcaggcaactgtactcatgatatcacatatctcccatagagtcacaaaaatcaaatgaatctcaaaaaaaaaaaaaaccaaaaactaattcttaaaaaactgaccacaatctttattaaattactaaactgttaaggcagtagtggagttaatcatttaatgatttttgtggcaactcacttttttgctgtgaaaaaaattgcaaatttaaacaatagctttctaatttgttattttgtgaaattggatttttttttcactgacatgatttaggataaagcatttatcactgaatatcttaacaccacagaaaagcatataatttgaaatttcatttgaatcttatgcttttagttagtgaagccacctcaagctatgtattatattttttaaatactattttcttattctttcaaatcttcataggtgtatacaatggattttgatcatatccaccctactacctcctttcctccagttctttccatgaacccccaccagttacctcatgtcctttcccctttttaatttattaatccactgagtacagttagtgctgcccgtaggctcatgggtggagggccattaattggggcatgggcacccaacaactgatcacattcccatagaaaagcaacctttcctcccttatcatcaatcagttgccagtaatgcttccagctggattgtggtctcaggaggccccctccccgcaagatggaatttttactggcttgatctcatgtgggtcttgtgcaggtcatcacatctgctataagtttatgagttccaaagcccagttatccccatccttcagctctcacaatccttttgctccccattccttggtgctccctaagccttggatggggatgttgatgtcaatgtcccatctgtggctgaccactcagagtcacttaccctcagctctttgaccagtcttgattgtcttcattgaccactaccattgcaaagagaagcttctctggccaaggttgagagtagcacagatctgtgagtgtaaacataaatattacaagacagtttgacaacatgaccatttagaaaactacaggtaggttcacttcttaggcccatgggcttttctcgggttcacaggaccagacatgaaatctctcttgtgaagtaggcctcaaatccatttagaaagtcattggttaccccctgtattagttgcttttctttgctatgataaaacacatgaccaaggcaacttacagaagagttgtttgggcttacagttccagaggcataagagtccatcatggtgggcaagcatggcagcctaagtaggaagctgagtgatcacatcttttacaaaaagcatgaagaggaggggtggaggtgggggtaagggcctggaagtggaatgaagttacaaactctcaaagcctgccccaagtgacatacttcctccagcaaggccatgcctcccaaacctcccaattgtaccaccaaactggggaccaagtgttcacatgcccaagcctatataggatatttcctatccaaaccaccacactcccataaaaaccaggtcactattgcaccagtgggcgtgtcttatctggaaggttggttttgctgcatgcatgatccagtgttgggtaagaccattgattgctaccttttcttccccagcaacctacatagcattttcaatctccgtggaagctagccaggtggtgaagagtttcctggtcagtgcaaggttaacttctctatgtccagcaaaccaagtgtgttgtgcggtgtcttcggcaatatgatcttgccatctggttcaggtgggcacccaagagcaacggcaatagcttgtgttgttttggggcctccgggaccaatagcttctagcgtaatattctatgcttggcactgaggttttatttaataactcatgtcttttgggagcagctccatgcactgatgcagagtacctctgtccagactgtttctttaaaaaaaaaaaaaagtttaaattagcttacatacttgtggttttccataaatcttttccatatgtcctcagttttggttaactcacgtcttacgcactccctctttccccacccccttgcctccgtgcacactcaggcctttagcccccagctgttcttctaggtcacacgtgttctactcctactcgcccctctaattatatagatcataggtttccatacagcttttcccacacacccttcattttggttaacccttcccttcgtttccccaaagccccacccccatctggcataacttttcagcctccactattctccctctccacttttaatcatgtttaatcatctcccctcccttaatacccacccttagtggccatttctagtttcctagatccacttgttctcccggttaaacacacaagacaaaagatttgaaactgggatctctctcatacgagagagatcatgcagtgtttgtctttctgggcctaggtgacctcacttacatgattttttttctagatccatatatttagctgaaaatttcatgctccaattattttctttatggctgaaaaatatctcctagtataaatgtaccatcctttccttatccactgatcagctggtgggcatctaggttgatcctacttctttgttattgtgaacaaatcaccagtagcatggatgtacaagtgtttctgaaacaggttataaagtccttcggctatatgcacagaaggggcccgactgggccatgtgctggttctactttttttagtctttagagtaaaccccatactggtttctagtttctagtttcactagttcacacctccaccaacagcacgcaagcgttcccagttcttcacatcacaccagcatttgttgtcatttgttttcctgatcccagtcaccactggggtaagatggaatcttaagatggtttaaatctgcatttccctgacagctagggatgtccaacactttttcagatggttagtagccacttgtatttcttttgagaactttctgttcaattccataggccattttaaaaaactgagttgttcgttttttgatgttcagtttttttttgttttttttttttttttgagttctttgtgtattttagatactaatcctcttttggatgtatagttgtcaacacttgtctccccttctgtggggtttcttttctcttggttgatgatttcctttgatgtactgaagctttttagttttgggggattctgtttgtcaattcctggccttaaattctgagtaaatagagttgaattcagaaagtcatttcctgtacctatagcctgcaggacactatctgtgttttctttttttaattttttattttttttgttttttttttttgagacagggtttctctatgtatctttggagcctatcctggcactcactctggagaccaggctggcctcgaactcatagagatctgcctgcctctgcctcccgaatgctgggattaaaggcatgcaccaccaatgcctgctatctgtgttttcttatacttttggttgtgagcgtagcctttaacagctgaactatccctccagcccctttgttttcgttgaaacctcatttcaggtttcacgttaagatcttcgatccatttagagttgatttttgtgcaggtttaaaaatatgtgtctaacttcattcttttaacatgtgtatatctagctctccctgccatcatttggtgaagatgctgtcttttctccagtgtgcatttttggcatcattgtcaaatatgagatggctgtaattatttgcacttgtatttggatcttgttttccattggtctgcatgtttgttttgtgccagtgccatatttcttttattcctaaatccctgtaatacagcttgatttgaaatattttataaaatgttatatatttaaattatttattggctatttttcttttttcataaactgcctattcagttcattgacccatttattgattgaaaattagttttatggggtatttattttttgcataatctagatcttaaccctttaccacatgcatagttggtaaaaaaaaaaaaattcccctactttgcaggctgtctcctccctattttgaagacggtttagcttacacctcacagaaatatcatactttttgactgctaaaaactggtaagttagaaggaatagatagtctatgctgggcatgatggtctgtaatcccagaactcctggaatccgaggcaagaatatggctaacctggggcacatagtgagactttatgccaaaacaaaacaaaaactatcatttagttttctatgatgaaacagaatcacagaggttgtttttaaagtcatcagaggagctaacgttggaattgaggagggagcaagttttagagaaatgaacacagagtcaggtccgggaataatggcacgctgtgataacagaaggggaacagggagcctagggtgccacaggaacaagaacacggggctgtaacaccgttttttacaggggcctcccagtctggaaggaagcaccgcctagctgagggcgtggggttggggtgggcatacctaactggaggccacttagcacaagcaaggctcctaacctgttaaagctactgtggccttttagcttcaaacagcccctccgcaaaccagtgagaacgaaatcctccggtaggagcttgtccacgtgtgagtattttgcagctaggattgacagccgcagtattaagagcaagtagatggggaagggcaaactcaggcccacagacaggatgcttagtgttggaccgcagtgcttcaaaccttagaagcagtttgaagcatgtcccccagagagatcataatggatcagtcccaaataactttccactattgttttgaaagaaaaaactccaagtattttaagtttcaaaatattttccccgtttaagggagaagatgattcccagttgggtctaattggcagtgaaaactgcttgcttgccaagaggcttggaggcaggcacagtgggaccgagcatgtgaagcttctcctggacgctaggtggcgccgtggactgagatttggtctaagaaatgttagcctgggagaaaggtcttggaaactccaattcttcactcccaggttttaaagtattattgttattattattattattattattattgttgttgttgttgttgttgttgttgttgttgttgttggtggtggtggtggtggtggtggtggttaatttggtgtgtagacaaaagttggctacttatcacgttttgcattcgtgaacagagaaagcgatggaggctgtacccagtgtgtgctgtcttgctgctgctagagccagctctagaggctcagcaggaaggaggctgagacaaccccgggctgttcctgcgacatcaatggtttgcccactaggaggcgctagtaagagatccacgagcaggggagggtggagtaggtctctctctcccagctcctctgctggactgggcccacagtgactacctatcttcttgtttctcaccaacaaaagctgtctttggatttgggttcactaattccctcttcccccttgtctctcgaggcctcggtcagcagttactctcttctgaaacttgcccactgtgttcctgtcttctgttgttagcccggaccactcctttgaaaagattgcagtggttacgctcctgtgcctcctgccagggtgccccttcctcacttccctgtcccacggtcggccagctctaagaagccaattcttttagtttcctatactcatcaccatacagccatatagacagacactcattcctttcaactatttattcggattgcagcatacttgagtgccgtgctatgagtttatttccacagaagataccctaaaggtctctagagcagcacacaaaaagctgccttatactaatttatggctgaattatattctactttataggaatacaattactttttaaccagctccgtatcagtagagatgtaggttatttccagacgactgttataaatgttgccataaagaacaacactgtttagaggccactgtcctctgacatttgtatgtctgagcaaatgtatgagattgagtaaatcgactcaggttaattcttggcagagcccatgtcaaaataatcagaaataggaggttaacatctatgatctaaattttgcagggcatgacacccccttcatcctcccctcctttcatcctcctcctctcttccctagctgtctttttcttttaaaaaaatagggtttggctctgttgcctaggttggtcttgaacttgtgaccttcctgccacagcctgttgatcagctgagcttccacgtgtatgctattacatctggctccaaattccatccttataaaatttctacccttccacatttattcccagcttagtggttatgaatgcagagccatggtgttggagtatactttctgctgcattggttattatctgtgtgtccttgggcaagtcatgacttcttggtgccccagtttctccatatacaggatgattcctttctcgtagtttgatgagaccacttagtgcttggagtggtgtctggcaccagtaagagccacataagcaatgtcacattcctgtagcctgagccagtgctgcccatctgtgggcactcacagtgaaccagaggtgttcactgctgtctcagtagtagcttgtctttcatataaatgatactattagatcaattcttgaaagcaaagtatggccaaaaattagggagctgggtacctgaaatgggtcctgagaggaagagactctccagagatatcttttgtacattacaattttgttttgattttcctgttcacgtgtacttaaaaatatatgagacccatatattcacccacctgcttagctagatgggaatccttttaggagattatcctttataataagacgatctgtagtctgtaagcgtaagatacttttattcagataaacaccagccaaacacaagccagagcgtgccaggggcagcaaggcaggcaggccagagagaaggggctcccatgtgccttgcagccccttaaaaccctatcaggagtcattctgacctcaccttgaccacgccctgataggcgtggtcaggcacacctgtagccagcccttaggaggcgtggttacggtgtctccctacaatccttcttaacattttcaagctagacttgtggtccataaggatccaccatctatacaccaataaaccaggagcatcttacttcagaagtccacaccacacccagctgagttaaaccatctcagcatcatcctttactgatctctttcacagacttcatgttgcacttgtttttaaatcctatgaattgaccaaagatcatatggaatccccactgaaagccatttttgttttccagggctcttagcaatagatgggacgaatttgcactgaggcagcagctgtagtcagcacagttctatcttcttctccgagatgttgcccttggccaaaaacacactaaaccgtctccaagttcaaagcattcagtaagcattctgaccaggcagaaccaccagaagcagacacctaatttccatgacaaatatggaaatgctgtattagcaggtggaggcctcttctgtgtttctatatggacacaaacagcaacatagattggaatagaatggaacctgtcccctcttggcagtcacctcaaaggaatggaatggtcaatagacatgccagttggtacaataatcaaggaattgtttcaaaatcagcataagtgatgccaagtcaaagaatgctgtattcactaaaatatggcatattgaagaaaaataaagtacctttgaaaccttaaagaattctatgaattatgtccttttagtagtcataagcttcaaccttgctctttctgcctcctctaagattgccttacacacagcttttggtttccggggaccattgtagagccacctggggagtaggaatcaaagggctgtggtaaatgtcttggctgacagcttttgattgatgtaggagggcctcgcccactgtgggtggcaccatctgtaggcaagtggacctgggctgtataataatctagaggactaagctagagagagtaagccaggaaactgttccttcacgctttctgtttcagttgccgcctcaagtttctgccctaacttccctcatgatggactcttacctccaggtataagtcaaacaaaccctttcctccgcaggttgctttggtcacattgttttatcatagtaacagaaaagcaaactaggacagaagtgttgagaactgggtttttggaagggaagaggaaaaaaagtagcctgacccaaagatgggggagaataggtggtagctgtgtggagagcaagccaggatagggaagatggcttccatatagattctatgagagttggggaactggtttcacttttcacagttccacaatcaggttgagactccaagcaggaagagcccagatggagcctatgggggcatggcctgagtgctgtgatgatggagcctatgggggtatggcctgagtgctgtgatgatggagcctatgggggtatggcctgagtgctgtgatgatggagcctatgggggcatggcctgagcggtgtgatgatggagcctatgggggtatggcctgagtgctgtgatgaactataacacagtagcaagcttccttgtggtggacctgtgagcaaagacagaatttcatgagagtatctcagaagcctgccaagataaaaggtcccatcagacaccaatcgacaagcagatagtatcatagcagctaagaaaccgaagaccagacccatctccattttcaagtcaccatgtgagcccaatgtgctagaattatgggtgggtgagtaaagtttcctctgtccaaggtaatgaaaatgtttactctaagcaatgagtcttattccaggagacatttctaccagacaggctacttagtttctagtctctctctctctctctttttttttccacttttcccctttccctcttcctcctcttcctctttgttcttccaggaatataacaaactcgttgtgtcattataagcatgccgtgacaaggtggttttcttgcctgtatggcacaaggggtgggtttgaatttctgccccagctgtatcatcccaaggtttgatatcatctaacccacagaacagattgtcaatacaatgatctgaagacttttttctttttctttcttataatgttggtcacactcccagcagaacaagcgaaaactgataaggtttatctgcatcagcaagtacatgaattcttataatttatggtcagttgtttccttaagtgcctatcagtgaaaacacaattagcagcaagactggggccaggtcttcctgcactgggagcacatgacttatctttgaggcatatcatgtgaaaccgatattcagatctcctcgcttgaggctggctgcagtggaggttgggggaagggaaggctacaacctcaagacgcttcatgctaagtgaacagaaagattcctccctgttaatatagaagggtcagtctctaccaggccccctcaggtcaggagtgcacaaggtttcatgggctcatggccagcttctgtcatggactttggaagagagctgtgtgagagcacactgttgaatttaacattctattcctcaagcagatatattgaaggaggatgttgagagggaagaaatggtatgattttccaatgggtgaaatcaattgctagacaagacaatcaaatgtgtgtggactctggagatggtgttgcaggcctgctaatcagctgtgactttgagcacatcattctctgtgcctcatctataaaatgcaaacattgggcagggctggagagatggctggcagctaagagtacacactctacttgaaggggttcccaatctctatgctgatcagctcataactcacaaatgaatctaactctaatttggagattcttctggatttctatgctcatatgcacgtgtggacacatatctctcccccacatacacgtgattatatgcccaagagtggggttattttgttttctttaaagatttatttatttatttattatgcatagtattctgcctgcaagtatgatggcacaccagaagagggcaccagatctcactatagatggctgtgagccaccgtgtggttgctgggaattgaactctgaacttctggaagagcagctggtgctcttaacctctgagacatctttccagccctaaagcccattgttttatatgctaatttaaaaagccaatggaaacattctagacgatgtcatttttcctgaatggattttgggatgtgtgtgtgtgtgtgtgtgtgtgtgtgtgtgtgtgtgtgtgtgtgtgtctgtgtgtgtgtctgtgtgtgtgtgtgtgtgtgtgtatctgtgtgtctgtgcgagcgcacgcgcactggcgtacactagcatttaaggggagtacttttcatttctttcaaggtatagaacaataaataaatatttcagcacttctgacctgcttggaaatataggtgaagtgacacatcataaaatttgaacttccattgagggtaattgtgaatagtcatgttttctttttggttttttgagacagggtttctctgggtagctttggagcctgtcctggaactcattctgtagaccaggttggcctcgaactcaccaccaggcaatagtcatgttttctttaattccactttgacataaaggttcttcatcatttcccactgatgctcagtgtgatgagaatactggatccttagaagagatccctaacacaatattgatttcctctgcaacttcaaaagccacagcaagacgttggtaagctttggcctagttggtgacatttgaagggatcttttaaaaaatactcttatgcttcttaaaatttctaaaatgagcaaaagaaattttaagaattgaaatgtcagtactggaaagatagctcagaggttaagggcacacactgctcttgcagaagacacgagttcttagcacccatgtcagccagctcacaattgcctgtgactgtagggacagtgtaagccacacctgctagaagatgactacaggtgtgcctgaccacacctgtcagggcgtggtcaaggtgaggtcacgatgacacatgatagggttttaaggggctgcaaggcacatgggagccccttctctctggccttcctgccttgctgcacctggcacgttctggcttgcgtttggctggtgtttttctaataaaggttatctttatcacaagctccttttatttcttaatgtgagactccagtccagggatctgatggccctgacctcagtggacacccgaacccacaagcaccccccccccacacacataattaattttttttaatcccagcactcaggaggcagaggcaggtggatctttgtgagttccagaccagcctggtctacaaagagctagttccagggtaggctccaaagccacaaagaaaccctgtctcaaaacccagccccaccccaccccaccccacaaaaatttaaagctccttaaaaactaatatttgctattctacttattttcttttataaaaatggtatttattttttcagttatacaggggggacacatacatgtgaatgttgttgcccacagaggtcagaagaagtgattgtaacccttggggctgcatttacaggcattgtacactgactggcacaggtgccagggactggactgcagttctctgcaagggcagcatgtgttctcaactgctgagccatctcttcacttattttcataaagcaaaaagaaattgactagtttattgccttctagaaatagccaagagaataaaacaccggaagtcagcatgttttattgccttttttaaaaagaggaaactgtaattccccaggtttggactttgtcatagatgggctcttggatgtcatagtattgagatgtgtgacaccttggagacatcatgtctattcttctcaataactttatatcactattatcacacatctaaccctggaaaagtagactagaaaagtctctgagatgcaaatctctaagagatacaagaatctaagagataccatgagaacaaaagactaccacggagcttctccgctgtttgtgccactggttttaaaattgtggagacatgggactaaactttgaagaggggaaaggtaattcttatattttacccccatttctcctctctctaactgagtgtgtttaattaaggttctcatctaaatgacattttttttttgatggagtcacatgatatacagtatgcaacattcttggttcctcttactgcaaccacaatcatagcctcagaagcaggcctggaggagaatgagatgctggaaaaaagccaagcccaggctggggatttgcaagatgtcagtttacttaccagaggaatctcttttacagccccagagtaaattctggatatttttggctgaggggtattagctctttgtgtgtgtgtgtgtgtgtgtgtgtgtatatatatatataatatatatatatatatatatatataccaatgtcattgacagctgtaaactccctgcaaatccagtaccttctgcaagtctcaggtacatacacagtgcctaaatcttggtccaaacttgtaagagcttttagtcttgtcagggaaacctgtctggacatgtagagaagaccgtcaaagcagatcttcttatgaactctttgaagacgattaagccaggcacggtggggtacacctggaatcctagaaggctgaggcagtggggttatgaactacaagccagtctgggctatactgagagatcctccttctctttcaaaaagaaaaaaaagattatattaaagttgttattcatcttgtttgtacctctcttgaaacagccaagaatctcagcagttaggtcaacttcaccaattatagtttaatgcattctttatattgcttccaaatttaatctaaaacaaaaactgtattgcgcctctgacatgtctgacaccggttatgtgagtttctcccatcagccaccacctgagcaaccctgtcttaaaatgcagctcctgcctgacatttctgggatctggcacccacacaggacttcacctcacttcaaatgcctccagaattccagatcaacctcaggcaacaaatagggactctcacaataggttatgactgatttacaactatacctcctgcccaccttaccttttcagaaatcggggttctactggaagttccaagcttctagtcatggctggaccatctcccattgcaaagtatccaggtgaccatcaggatgtacctcattagaataaaagatgcagggctggagaaatggctcaacaattaagagtactgtctactcttccagaagacccaggtttgatttctagcaaccatatggcagcttatagccagagtgttggggcatccgaaacagggactgagagtagaaaccagctgtcttctgctgcttctgctacacagtcttctaagtgaaagaaaactacatatccattttttcatgaagaaattaagggttctgctgtgaatactcttctcatctgctacatgttttctactgtagaaattgcttccagtggactcttacaaccaaactaaaatcccaagtctccctcatcttcccatagatccaaagagatgcgaaaagttgtggttgatatcaggcagctgttttctacgttagtttcaagtccacctaaattctattagtccgttttctttcttttcattggcccccgatatagtccttttagcaaaatagggctttggcaatcttgccttctccgcagtatgtgaataaatccctaagtctcacttaccactcagccgatttacctttaggataaaatggaattgttccctgtgcaccctctcagtatctcttcatttctttctgtcattgttcattcattcattctatgaaacttcactgtgacaggcactgtcctaagagatggaaaggtgagtcttgatcctccctcaaagactacacatctggtagaaaaatacagacaaccagtgtgtatgcttgtctgtgtattagagagtgccctccatctggatggacagatcttagtaggactcaggcttggcaagtgagagtacagatgaaggcagccccacctttcctctttggttgggagactttgtgtagaacacaatgtgagcaactctgtgttatggccccaggggagagcctatgagaactcaaggtttgcttctctagatactggcagtcctgtattttccttatgtttccatgggcctccagtgagtggattgatcttcagggcacctcagtgacattaaccaaagtccccagttgggaaaaacagggatatgaacagtttaacttgcctttagcaaccggcaaattaaaacaggagggagaaaacacgaacattttcttctctgcctatcttcattgttagtactcaggcttgtttagcctggatctgcacatgagaggtacctggatctccacctgggaagcattgtactcttattctagcaaaggctaaagtcagaaggagaagggatgtttgataactgttcagcctgaaggtggtgtctgagcatcagtctggggtgggggtgggggggtaccttaaaaaaaagaaaaagcagaaacaactgaagtacatgctaggaagaaaagtgaatgtctcttccccctggcccagcttcattggtatccaactacttaactatgcacacacagtctctctctctctctctctctctctctctctctctctctctctctctctgtgtgtgtgtgtgtgtgtgtgcattccatttatttggctcagacctgcttctttgagtgactgcagtacctttagactttttcagagaccctagctgatccttagcccctttcccccattgaagcttggccttccttcttgaccctccttcttggccccaggtagctcagaaaactcaaatcaattgaagctagtaggctttaccttctgcatgtagatgtttttccctgtgagaggtactaaaagacaaaatatctagggtccagtgaggactttaatacctgtgtaatgctgtggttggagttgactaaccggttaggtctgatctgttgggtcgctgaggtcagagctcaatgcaccccctacaaactaacaaaggaagacctctggggaggaggctcaaaggaaaaataacactgctatctccaacagtttctgggaaatcagcaaagaaaacccataaggttacaagtgcatcatcaattgttggcagaaccatgtcagcacaaaagagggattgcaacagaaaggggcatgggcatgggtatgtgggcttgtctgtttagattgtaaaatacaattctacatggaaactatgtaaagcacaagtgcttagcacaagttgatagctctgcacgtacattctatcattttgccttggcaaagtgtggttgcaggtccagggagacgggaaattagagaagaaacttgaaaatatcaatttttgaatctgccttgtcctcaggctgttgggggatatacaataatactgtgaaccccaaatttgcatttgtgctaattaaataaaattaacattgggtcaggagattgcattagcaactagttgacaggaagtaaccatagagcattagagagaatccaggagagagagagacacacaggaagtagcagaaagagagggatttggagtggtgagccttttctagtttggcaaagcagaagcatgggtcttttggagacaccagcaaggataagagggtcaggtggttgctactcagcctctctgagctagcaggttttcactccagcctttgaaactcgcgtcttacttataaatagcatgatagagatttagtcaaagcaatctttagaagcagcaacagagctggtgacggtgggaacagaattcctgccaggctgtggccagagaagcaaagaacaattgctggctgaagtcacagtagatttagctgcagccacccacgatgctgacgttaaaacaacatcaggaaaatttaattatctttatgatgataaaactaacggttttacacatttgtcaattattagaaaaatagtgtagcctctccaaacctctcttgtttacagtgttctcagtgagtaaagactgacttgaagaggcccgaatactgcttgagttatattcaaaaagtaaaaactaaaaagaaaaagaaagaagaaaccttatgtaatcagtcagtagatggagacgtcatagggctaagtgcacttagaggaagcagtgctaaggatgaaagagaaagatccttgatgtctgcaagtgtggtctctacatcttcactcaggcatcacttactgctctacagaggtctgaggtcagacacggagctcagaaactctgagagaaacctgatagattcattttaggtccattgaacctactaattaaaaaactgcttcgggccaccatttgaaacctctttgcttatttcattttcttttataattttgatcgtcgtttataaaaacgcttggtgtgtggctggccctggtggtacaggcctaacttctcatcacacaagacacaaagcagggggatcatgaattccatggagcttaaaccaggtagtgggaccctgcctcaaaatagaacacaagttctctactttagcctgttagtggcattagcagttgctttctggacttagcaaggtacaccctcttgtgcccagtggccctgactccaaaccatgtccctgtgacttatctatgggccacatacacacaccattgtctctagataggattttgaatgggcgagggatatttacaagcataaactcttgaatcccagatatacaaaacaacttgtgttggaaatctcacatttttattaaccttctaagaaaatacaccatttgtctatgcacgtcattcaagaaggtttatttggctttctcataaactggctgaaactgctttactccacttcttgtaccctttggaagtttcctaagtggagagggaacatttagacctgtgtgtcttcatcacaggtgtgttgtggaacattattttaaggtctgttacatttgtttatgctgtggaacatttgctttagtgatgcaaagatgtgttgcattcttttatgttgcatttgtttaactctgtgaggctgtgtgatcctttgcctgtctaaaacacctgatggtccgataaagagctgaatggccaacagcgaggcaggagaaaggataggtggggcatagagaataaataggaggggagatcttggagaaaaagacctaggaatgagagaaggaggaggatgctaggggccagccacccaaccccacagccagacacagaataagaaggaaagaaaaggtatgcagaaatagagaaagataaaagctcagaggcaaatggtagatgggataatttaagattaaaaaaaaaaaaaagctggctagaaacaagccaagctaaggctgggcatttacaattaagaataagcctctgtgtatgatttatttgggagctgggtggtaggcctccaaaagagccaaaagaggcaacaagagcaaagagtaaaaaaacaaacaacacagatgaaagtcagtgtctgtggacaggcggcaatctcccttacttagaaacagtaagcatttctccagtcctttatgtgattgtgtgaagagctctggagtttgataaatctgtgcttatctagagtgttagctacctattgatggggttctatagcctcctcagcacccatttctcatttgtcttgctggaacacaagataaaatggaataattcatgaagaacatctaattagtattgagcagaccaaattttcatacttgataacatcctcacttttgggtgatggggcccaaagagggtgtaggagagatctgaatggtgaagggagacagagcgctggggagatggcacagtgcctaagagtgtgaactaaacttgcagagggcacaggtttgattcccagaacccacatagggcagcttacaactgcctgtgactccagcacgggggatctgatataatcatctggattctgcaagtgccttccctcccatgtatatataccaacatatagacatacacacatgcacatgcaatttctaattttgttttttttttttaagaaaaaaagcaatgaggaacgaaaggctatcacctggactttcaaatccatgtgctcaggatgttgtccaccagcaaatgaagtcatctggatttttaatgcccagtgacctgaggtcatgggagtgtgttctgctgcgttgtgaggattgctcgtcgcccccagagacctttgtgacacctgtcagaattcaccagttttcaagtggccacagtgctaatcagtgtccaaataaccttgagccccacctctgtgtgtaactgtgagaaggtccctctgacttttcctctagaattcagggaattcccaaggaatgcttgcttattgccagctaccaccagccactgcaatcacatgttgcactttctccagacacaaaacaggctgtaatatttaacaaagttttattgaaggagatgtgggtataataaaaaaaatagcatcagagaaaaaaaaatccacctgagccaacctttggattgccagtcagccccacccctttactgtatggtagggacctatcctgttacaaacatccagtttgtggactgtgcctccctatctcagatgccagagaaagaaagagcccaagggcctaaactgtactaacagagacattcttttcccataaacactgccttatgaatgcagaaggtgctcaaaaatgtttgttgaatgaatgcatgacatctcaaccttcctgttccaaattaggatcttagctttacatttatgtaattaaaatgcttatttaaaatatcccccttaatcaatctccaatgtaaatttaaaaaattccccttctgttgcagataaaaatgtagagacttaaaaaaaatgttaagataagtttagataatttcagtgatctgacaacttggaaatattagcctttctcccaccctcatactcaactttctcaatttttagaaattaaattttcacgaactgtttggcctcaggctaaacggtgcacctcattgcacagggcgtttactattgagagcatgtttctgaaaattccaggtttttacttttgcatctaggctgactgaataagttctgttttcccatagttgacttttaacaaaaaaatatgatactaatttctagaagctacattgagttgctatacactaactccagtctccaggcaggtggaaaagggtcctatagactcaattagcaagatccattaaactgatctccatacctcacctctaggcctcctggtatggactgtagtggtgagaagtcttctacagtgcactgaggtactaagtgtttgaggactgttgcaacatttctcctctctcatctctttctctgtccaagcctaaaaaaaaaaaaaaaaaaaaaaggaaaaaaaagtcatcagaaaatatagctcattgccagtgttgccccagtgactcttacttaatcctgcaaatgacttccagaaaatgcagagtttcagaaagaatgttcaacctgatgtcctgcccctgtcctgttgaagcctgggttcaggtcccgagacagaaagggacatgggtggaagaaaaattgtccaaccatatgatgagttttacacaagtggctggtcccaaacagccctagcggtctttatttatacttcaaaaacaagcatgtttttcctaccctccaacgttaacttccagcaaaaacaaatatgtcaaaagtgattttttcccaacttttgtgtcaaaacatcttttttagccaaaaacaacacttgtcattttgctaccttggctaaatgttgagccaggcacatcctgtgcttacagagttaaaaggagaacaggatatccaacaggagctacagtgagaacccaatatcagtggctaacagagccgcaaggccttgagccagatcaatgacgtgtggactaaagggcagctgtgtgactcaatgggccacactacagcctccacgacaagattcttctctctcttttttcttgctttctttcttagttgtatttgttttttgggttttcttttaaatttggtttggttttatgaaggagggtgcaagggtagatgatgaggaataagatcgaacccaagataggttggttattaactggtaatttattaggaaggtatactcacaggaggtatcagtaaccagatttggtactccgagaagtctgatcccagatgtttccaagatctggcctgaaccccaagagacagcaggtgcctcctgtcctctctctttatcctacccctctaggtacctgtgaccacgcccaaatggacatggtcaaccgtacaggtatccagggtctctccctacaggtaaagggtggatacaaggggatagggatcggagtgcatggtgtgaaatccaaaaagaatcagtaaaagttaataaaggtgatagacataggcacacatcctcaaaaacagcaccgacatccaaaacttcgccaagcatatttacagaaataggggtgaagtagcttacagaaataagctacttgcatacggtcagcttatattttctctaactgttcccttgtcctatctgcctaagcctctttataaaaggcaaactttgataagtcactctttttccattttgccacactgttcttaatgtgctttcccagaattggaagacatagctaatgtcccctgtgttgtttccttacttgtgcccattaactttatctgtcccatgcatggctgacaatgtgaaactaaaaccaccaagagaatcctcagtactacgagagggaagagagtgtgtaggccacttagtctcagcaacattctatactgtcccaaggtctaccagttctggcccagtgagagactgtctcctactggctctgtctcacagagacccgttggacaagcactcatatgctggtccaaaactaggccacacagttcccaacaaacccctagagtaccactttcatcagtgggattttggtgctttggtagctgtttctggccactcttcttgatgactaaagcatttactcagggtcagggcacatgggaaagggatacagaatatattcatcttcttcttgctggcacaactcaaagctgtgtgttgaactgaacctttctttcctctgtttctgcattctctggcctgaagctcagttaggggcatgtgaggacactcatcagtggacacaagctcctcatgacagagatgctgtatactccacctggatccatgctgtttaccactttggttagcatctaacaaatgttttggtaaatgaaaaaggaaaacagactgattttcccatatttacaatttcctggaatagtccttgtgtctgcttcagtaaaaaatggcctcttccccaaggactcatataataggctatagtagagttaagcaatagagctaaagaacttaaaacctaaaacagatagctaaacactgatctgaactctggaatccaattgcagagagggaggagtgatgagcaagggatcaagaccaggctggagaaacccacagaaacagctgatctgaacaaggggttactcatggatcctagactgatagctgggaaaccagcataagactggtccagatcccttgagtgaggaggtcagtttggaggtctggacaatctacggggccactggtagtgaatcagtatttacccctagtacacaaatggactttgggagccctctccacatggagggatactctctcagcctagacacattggggagggcctaggccctgctccaaattatatgacagacttcaaggatccccatggaaggcctcaccctccctgaggagaagaaaggggatgggatacagggttgatggggggcaggggaggaggggagggagagggaactgagactgacatgtaaaagaagcttgtttctaatttaaataaaaaagaaaaaaccctaaaacagtctttgaatcttaaaagaatccccaacactgaatgatgaggcagaaagacagaggaatagggaagtgtgcagaggcaaggctgggcatacgtgcacacttcctgacatgctcacacagccactttcttttctgggctgtctgagtctgctcagaggcgtttatttaaagcagttacctgtctccctcgtccagcccctggttagtgcctccaagccaagctcagaatttcaccatgattcttcactaaccctgaatcactatcagataaaggtcagagcacctagtttcctagaagctggaactaaatgaaggaagtaaatgccaccccttacacacacacacacacacacacacacacacacacacacacacacaccagactccctcttctgcacctttatctgcatttgtcctgctctggacaaacagatggacagttgtcccaacagatggaaagagaggcaggtcaaatgaatacaatgggtaatgtgaaagcaagtctgaaaggttcttgcttcggtgttcacggctgagttccatcaaatacccagggctgtggccataccattgtaacagacagaactggatggaaaaatgcccactttcccatgcaccctaagtggcccctgctgccctgaccatccctctgggacttgtctctccgcagggttcctcaaaaaccttcacaatcaacacccacaagaataactcttgcctcagcaaggcatttctgagatacttctctggagtttctgcctgtgaccacaccgaatggccagggatggggctgggcagctggatgagtctttggagtaccaatcctgctcttaatacttgctcatcacacatccctagaaagcctgcaggctcgtcacatttgtccatccctccctgcttcttcttctgttactgactcccatgaggagctctgatctactttggattccttgagtctatttccattcaccagacatgcaactgtgtgcaaccttggtttttatataacttctcagtatgtgatgcaatcctctagtttgttttgaagtcctcagtgtgaaacatctaatgcatgcactgttttgaacttttcaggacacatagctgacagaggattcaaaccacaagataaaaggtagtaggccctggggcctaggagtatcctatataccttgaaagagaagagtgttgctgggatgtccagggtcacactgatgctcagtcagaaaataaaagctccgttacctggctttgacctgtccctctcagcctgcatcccacctccccccaacagcccttaaacatcatgcccaccatgtagcagtcacctgtgaaagtcgtctttctcttctcttcattctgagaacactcaacaaaagtctttgtgtttttggaaaggcccgatgtagtccccacccatgaatttctgccaccgggtgggtcttgatgacaacttccccaagcattacttggaacagatgcatgcagcaactcctgtcacatgagcctcatatgctcagccacagctcagtcaagcgtatgtgctcgggcccttgtgacatgtgaggctggcaggatactggcaagcccggtgccggctcaaactttcacttgctcaacttgtcttttagtttctctttagattctcataaaaacacaggtgaaaatttgtgcctgacataagggaaacacatgttgaacatacaaaaagtttgccaaaactccagtctatcagtgaccttctgagttctaataggtagacccagaaattctaaattttcacatatttttaaatataatgcttaaatttaaaatgtttaaatgtcaaaattttagacatatatttaaagtatccaaagtgcatttttccctctcaaatacgggaagaatatagtaaaataaatatagctcatagtctcctggcatgggcaaagctatgcagcgttactattcttatgatacagctgagcaagcaaagggaaggaaagaaagaaaaatgaataggatgtgagattttttttttagcaacccctccaatctttacaaaaggattttatggaggaattttcctcaaattttgcaaagaaatgacagagaagcatcttaccaataacaacattgcaggggtaattttgttgtctttgaataccacagcatttcagtggccagtccactttagagaacgtattctagagaaatgagagtttacataaaggctaacatctgtattataagcaattatgtgcatctgcttctctagaaggaacttgcacagccttatgtgtgaacaaaaccctcttgagagtctagtgtacccctttctagactttttctcatgttagttactgggcttggcattgaacccaaaatagtgctaaggtatagttagttgtgagaccagtgaaccattgccccgcccattctccctcccacctcatctctcattcacacccctcctgcacacacaacaattttgtcttttatctgaactttttgtatcagtgagctgacatttgagtcctggctctccaaaatgtgaaaacttaggaaagttactcggcaacctagtctccatcttttcatctttgtaaggcttgggccctcttcttccatagggccctataacatgaagagataaatgcaaattttgtgctgacttcacagcaagtgccccaacacacagagacttaacatggcattcaacaattatttcatatttctatctagtttagtgcccatggttagatggtgacctgtaatataaacacaactcactatgactaaactctttccattgtgcttgacaggtaatttccagtttggggtcacaaataccgtaatgaaagcatgttataagtaaagcatgttcttcccctctgttcttttctttagaagaattcttgcaattcttcttgtaatagtatttctaagtagagtcattaatcttgagtaatctaagtaaaagttttatatttttcctacttcattcaatgttgtaagaaagcacacacaaaaaatgagagagagagagaaagagagagagagagagagagagagagagagagagagagagagagcgcctttatgtgcctatagcttcgctgatactttgtattagtcaatactttgtattatttccttagagagattctgagcagtagaattacttgagctaagtgtagggcaaatggcctggcctccacactataaatactttaaatgctgcattgtgacaatttattccactattaacaatttatgagactacaagttttgaatggtctagtacattaacatatttagtgtatatatttagtatgtgttacaatttagaaaagtcttagccagtgtaagaaggaggaaaaaaaccctgcttaaatttggtcttgcttaaaaattttgtattatttcttttaatttaaattttaaatcacttggtaagttactcatttcagtttgggattttggatcaagggggactgaatattagaatgcttcctgacttgacaaacaatgtcattgttttccctttctatctctacagataaaacattctggatctggttgcttcctctctgcttcctgcagttgttgtaacctggaggtcaattttcacaggacaaacagaactgagcaggaaacatgctactgtcttgttccaaaagtcaacagaagatactctgttagtatattaattagctttctgttctctgtgacaagatgtctgatgaaacaaccaaaggaaggagaaatttattctgcctcactgtttgagagtgtcagttttctggcaggaagggtatggcatggcagagtgggcccacacatccaacaaggaagaaaggaaacaacgggaatgggcatgaacttgaggataagtccattctctagggctcttctcacctcacttttgctttacgaggcccctcagtctacaggatggtgtggtgccgaccacatccagcaaaggtcttcccacctacagaattgtctctggatgtgaccttacagacacacacgtgagtaaactatactagtctcctagttttgaacttttcagtataatcaagttggcaagtttagccatcagggactgtggagatggcttggtgggtaaagtgcttgtcccaaagagtaagcaacagaattcagatcctcaaaaccaatgtaaaaaccaggtgggtgtggcagccagcctgcaatgccagcaagctggagggcggtaggagcatgctggctagctagattagccaacacagcaagctcaggggtcaagaagaggccctccctcagaacataagtgaacagtcaaggaatacacttcacatcaacctcaggcctccacacgcatgtgtgcatgcacccacacacctacataatgcacacataccacacatacacacacctaacaaagaaagagaaaaggttagtcaccaccagtcaactcgaaattaggtcaacagtgtggattatggtgataaaactcctcaatactattccacaagagacaccaaagctgctgcagaatatactattcctatagaaaatttatgaagagtcaagtcatacttgcttctcttctgggtagggtggaaggggggggcgtggctggactgacggccatggctggttccattaagctgtgtggatctgatacattcctgggccacaggagggacagatctgacaggcggtaggagtgtgtggatctagtgtcgtgcctgagattcactgacacatttttccttcttgccttcttttctctagactccatgcataatatttttaaaagtatttttaaaaatgtaaatccttgttttgggttctgtgattatgaaaatgaatttaaaaaatcagttcttgcttctagctacttcacaggcagtgacagtcagactgagatgtaattacaaaatgccattattatgagggctctttgaaataaatgcgtctcggatgtcttggcctcttcttattgtggttggctgaagaatcttaagatataaaaggctatgccatttactagctgagttaatagaaacaatttaattaaacttcatggggctctagtttgcttacgtacaaaaataaggaccttaagagtccctatgtctctaaattgtgaagtcagagtcatcaaacacctgtgaggttattagaacagtggctaggtgtggtagtgttcctctgtcatcctagcacgtgggaggtagaaggaggaggatcaggaggagttcaaggccagtctggcctacacgagacctactttcataaccaactaaccacacacacacactggaatggaatgacagctacaatgataaatttgatcaacttttgtgccacatactaggtttaaggcatgggaaatctaatgtttcaagcccagccatgaaaagtccaaactgttcctgcacatgaacacgtatgtctcctgtgaaaggaaagagacacactatcaggaaaggcaacccacttctgaacctatgatcgtttgtctgaagcagagacatttttacccaggggttcaggatggtagtgggatttttccctttggtggttaatattgaccgacaacttggcaagaattgagactcaccgaagggacaagcctctggacacatgagtgagggagtgtctggattaaggtaactgaggtgggaaggcccaccctaagtgtggcctgccctacaccatggactggggctgcagactgcatacctcaaaaacaagaatgctaacccctccctgcagggtttggggagctatgctgaagaggaggtagaaggactgcaagagccagtggggatggaagacaccaaagaaacagcgtcttccagatacaacaggattaactgtggcatcctgcacagggcctgcacaggtccaggccaggtgtggccccagctctgaaaagaagtgaatatgagttcccatcctaacagaagctatctacaattcacagctactggcaaaggataaaatagctttctccaatggagtctccctgggtatataaaccacacttaagggtagcttggatgcccagccatagatggccaatagaaaacaaactcagtggtatgttttttaggcatgttttgtctctttaatgctttgtgcttaaaaaaaaacaaaaactttcttgacttttgctttcctgttttccgattttatgttcttatgaattttatatgtgtgagtgtgtatgtgtatttccctgtgtgtatgtgtttcttgtactcttttttcttttttccccctattaatttactttgttttattctgtttttgatttttaattggaccatgtattttctaaagagagagaaaaaaggcatgggattggttcggtggggaggtggggaggatctgggaggagatgagggaggagaaacagggatcagaatacttcatgaaaactatttctaatagaaaaggagaaagctatctgagtacaagcattaatctctttttgctccctgactgcaggtgcaatgtaaccagttactgcagactcctgtcgccatgtcatggtggactgtccccttgaactatgagtcagaatagacgattccttcttttagtggcttttgtcataacagtgcagaaaccgttggaactcccaatagctttccctacacattttggcaaacgtccacagatgcacttggaacctccaacatatcagctcaaaggcttctctgattcttgattatctctgtcttaacatccagaggaccacagggccatgtttacctgtgacgtcatagaagtactagttacttttctattgctgtaataaaaataaactggcaaaaaagctactcagggaagaaggggattattttggcttttggttccagagggagagagcctcatgggtttgaacatagagggtctgttaactacaggccatcatcttgtgatcataagaggacacactgagttgggtggtgggggtgcactcctttaatcccagcacttgggaggaggcagaggcaggctgatctctgaactctgaactctgtgagctcaaggtcagcctggtcttcagagcaagttccaggacagccaagctacacagagaaaccctgtcttgaaaaacaaaacaacacaacacaacaccaccacaacaacagaagtgcagaaaggaagcagaaggaatagacaggagaggagaggagagaagaggagaggagaggagagagagagagagagacagagagagagagagagagagagagagagagagagagactcctgagggcatttgttaggacccatcgtacctctaggttattcaattgtgtaaatgaataatttgtcttttgcatataagctagtttgcacatgagtttgttttttttgttgatgttgttttgagattggcttttaaattgtagactaggaaagcttttaactcgttcttgtgccttggcttcctaagtgctgggattggagacacgcaccaccttgtgtgctgccaccatgcatacgccaccatgccagctccagtctcaccttttttttaagttattgaaaacattttcttattttttcatacagtatattctgatcacagttttccctccctcatttcctcccagaatctccccacctccctatccatccaactccacacctcctttctctctttaagaaacaaacaatccaataaacacaccagcaatccagaataaaacagagcaaagaaacaggaaagagagagaaaaaacaaaacaaaacgagacacacatgcttgcatgtatacaaacacacatcacaaaaaccataaaaacacaaaattggaaaacataatagaaaagcaaaagcaaaaaaaaaaaaggtttaaaaaaaatttcaaacaaagtattatgagccaaaacatctccaacaatgctatggagtttgttttgtgttggccatccacacacctcccctaaatgtggtgtgcatacccagtgagacgacattggaaaaactaatttttcttttgtgagcagttgtcagctggaggaagtgtctgtgttaaagttgaggccttgtatcccgtttccccctcagcactggacctcatctggcttggccctgtgctggccctgtgggtgctgccagtctccatgcgttcatatgtgtgtcagctctgtcgtgtctagaaggccttgtttccttgctgtcctctgttcccactgacttacaatctttctacctcctttttctgcacagctcctgagacctgaggggaggggtctggtggagcggtaggattttggactgagtagctgttatatttgagcattattctagtaaacatggttataagggattcgaggtgagatttcccctaaaaccacaggcagagcatcagctggggttctaaactggctctaaaaatatctcccactccttcgggttgcaggaacaactaaatatgactgagaactcagaagcaaaccaagcattcaggaactggtaagtctacggagaacaggaacatggaaggagcaggacccaggctaggaatggggacatttgaccgggcttgtcctcaacctgcccctgaactccccttcataatgaaagaagtccctctttcctgtctggtgacactaactttcccttgcttaaaaccctgtataaccacatatgaacaatggcctcccaggggtatccccgttcctcaaaagctcccatgtcctggcctcattccgagtgataggagtagagtctaggtggataagaaacgcctcatattccaagagaatcacaaatttttaatttatattggaataaactgaatattacatgtggagtggattctaaaggtatttgattcgatggagccctgactgtcacttcctgaattctttggactcaacattttagacagttccagtatttctggtcccccagaatatcatgctttgcttcacatcgtctctttacacactgaaatctggcatgcctgtgtgctttctttaaccaaagagacattaggaaatgtggtacaactggggttggagagatggctcagtggataaaagcactggctgctattccagaggacccaggttctatctccagcactacaagttggcttacaaccatttataactccagttccaagagaatccagcgccctcttctggtctccacaggcactgcatatatgtggtgcacagacattcaggcaaaacacccatacatataaaataattaaaaatagtataaaaagccgggcagtggtggtgcatgcctttaatcccagcacccggtaggcagatctttgtgagttcaaagccaccctggtctactagagctagctccaggacagccagggctacccagagaaaccctgtctcggaaaaaaaaaagtacaaacatagaaaataagatacaatcatccagtccaaattgttaacctagaaaatcataaaatgtcactaattgttttaggtctctaaatttggggtagcttgtaacacagcaaaagctgtaacagatatatcaactcgtgcatctgggaaaagttttgctttctttgtaggaagatggactaacagtaggctacatgggtgatgctaactcatcacatagtctatgggaggattttaaaaactcagggagacaagactaatgggaaattggtcatgtataattatgtatcttgcctcaccccttgggtcctgcgaggtctagagagtaatgccttctctgaagcccagagaactgtattcatgaggttgagcctcagcaaacttcaactgttctaaccatgatttggcaggcatgaagcatcgcctcagagttgtatttcttgatctcagtggagatgacgagataccagactagcactcagaattttcttacccacaggaatctctgaagaggtgtggctctaagaaccaagggctatgtcatctataaagccaccttgaattacagactagaaaccagatgtgtcttaccacaactgagaaccttgcttcttcctctatcccaacattggtatgagtcagaggatattttagtgagatatatcacaactaataaaaataatttaaaataataattgttcaaagattttggtcaaagacagttaagaatctaaagccatatattacaaaaacaaatcagatacaactgaactgtctatatccaaaaactactactttataaggtaagttttaacatgaaatcaaagaaaattgatataaatggttgttcaaaatttacataatttatttattctcaattcatatttgttaaagaaaggaataaacatttctcagaaagttttaaaaaatcagttatacataattttcatctgacagtccagtgagaggggtgttattcttaggatgttcatatataggtgaaaacattgtagcttaaaagctaaataatatatcaaaatgattaaattatagagtaaacaaaacactgaacaagaggttgagcagggaaaggaagagcctattagatacagattctaatggtggccacaggaagaatggtggtttaggagcaaagccaagggtgaccaaaacaggaaaacctaagtgccattgctttagcctgttatattggcaaagtgaagctttaagcataccagtggaaaagtattccagtagcaatgtgaacataaagacctctggaagtagagggtgcatctgtaaagcttgagaagttcaccttctctacaaatctctgttgaggtaaccatcccaaggaaagcaatagagcaaaaccacaccacaccaagcagaaattgaattataaaaatagaacttagggaatgctctagaatttccaaggaaaatacttggctcacattcactttaaaagtaataaaagacatacagtgggacagggacttttatatgaaggtttgatttgtgctctgtcatgcagtttgtgagtgtctgccttagcctcattgcatgtgtgtgtgtgtgtgtgtgtgtgagagagagagagagagagagagagagagagagagagacagagagagggagagagagagacagagagagagagatgtcatggcacagatatggaagtcacatttacacaaacatatccatatctctgcacatataaaggcaattttaaaaattctttaaggtttaatttttttttgagatagggtttctctgtggctttggaggctgtcctggagctagctcttgtagactaggctggctttgaactcacagagatgtacctgcctctgtctcctaagtgctgggattaaagaaaatttttaattgcctttctatgtacagagatctactggtcatgggtgcccagacctaatggatacatatatgatagaactcttgcatgcaagctcaagcagcatcctggaagaggtaatggaaggatggcaagaccaggaagtctgctgtgaaatcgtgtctcccagaaatgactgggaagctacattcagcaagatggctgccttagcaagagctgaacaatgacaccaccaactagactagttaactaacatggaagagggaagtctcataggtcaccagtcctagacaaagaactacagacaactcctgatttctgagagaagaggttgcatctcccagcgatgagcccctaactgactatccaatatagagtggttaactttgaaatcataaaaacataagcaacacttaatagactcaggaagttgtatttatatatttgtgtgcatacataagtaacagtaatattcaaagaagaagaaagagaagccattgatttgagagagagtgtgggggccataggaggggttggagggaagaaatggaaggacagaagggacataattatattttaattaaggatttaaaattgtcattatttactttttaggcaatcacattaaggtcataaaaagttagactaatgagtataattttatcctcactatataaagatgttcagagtcagtcatgtataaaacacctatctcctacacggtactgtgggagtcggaagagtctacacttcctctgtcttccaggagtccaagtgggggagattaaatgtgtgctctagtccccatagtttaaaaatgaaaacgtgtatgtactgagagaaagagagagacagagagagagagagagagagagagagagagagagagagagagagagaacttgtgcttaaaggaaagacagatcacaatcagttggaggaaaattaggaagagtataagagtatgtctcctaggacagggacaggtaatgattaaaacatggacagccttcttccaggaagatctgaagttccataaatgaggcattgtgggtggaagagaccacataagacacacaaggaccagtgagcactttgacgttgaggcctgtgtaggagttcctgggactgaaaacccatgcaacatatttaggctggaagtttctttaggaatggaactaggagaaatctggtgctgataaatcagctggtaatgcctgaatgctgtgctgctgataaatcagctggtaatgcctgaatgctgtgctgcctttgctttggagacagtggctggtatgttgggggattcacactgacacatactttccacatattcattgcacaccgcacataatagtgccaggtaaagaaaggcaataaacaccattcatttactattcaattttcagataggaaaattaatgcttaaggaggtcagctgatggatctaaagacttacatagtaaagctagagtttgaaccttgggcccccaaacctggacttcccctacacatacctcttgtatctcaccaggaaaggtaggcgtgaaattaatccttgatcagtcgaaataccactgggcatatgcaagtggcaaaagtccaccttgaagtcccatccagggaaaccagggcacgttaaaggctgtaataaatatgggtttgatgcccttgctcacttacttctcaacaaagcaagtagccccagccagactgtctaacctttctggactctgggtaccttgcctagggagtgatgtcattaatagttcccttttcagaggattttgagagaagtcactccagtggtgtgtgtaaaaggcttcatagtatcaagcacctagtaagtatttggtaaatgttaggggttaattttaagagatcacagtgtaaaatagtgcacactgcacacactaccttatggcctcttaggattttaggatattggttctacatggcctttctctatttgatatcctagaaaatagccccagcaagggccaaagatggcaatattttgtcagaatccattatactaccgattcctaataaaacaagcaaaccactcaacactgattggcaatcaggattaggcctgccaatcatgcatctgagagcaggggtccagcataagtgagtctgtatacccagaaagacttttctgtctgccctgctctctggtactgggagggtctgcttccccagcaggaatcttaggctatggcatagaagcagtgagagacccaccttgctgcaaaaggcatctaaacacacctcagagatttgtgcttcacaggcattctctgttctgtgcaggaagatgatgacagagtaagatgcaggttgtgggaatgttacttccactatgtaaaaatgtgttacatttgtttatgttgtgggatattatgtaacgatgtgttgttgtttcatcttgcctgcctaaggcatctgattagccttacaaaaagttgaaccgctaatagctagacagtgggactggtaggcagaaagcataagtagaagaaggaatctagactccagacagaagaaaaaggaagagaaaggagaaggagatgccagggtccagccaggcatctgccatccagacagtcatggaggaagcaggagagtaggacatgtagaatgaaagaaaggaaaaaagcctccaggtaaaagatagatgaaaagaaacaggttaatttaagtttttcgtttgtttgtaaaaaaaaaaaaaaagctagctacagaagcatactctaaatattaccattaacccttttcatcccatcaactccaaattcagtctaaacactgggtaaagagcttgctttaggctcactaacttacagctgtgacagtagctaatgggtacatttaggtagttctcaggtcagtaaattcactgagctccatagttctagcatacagaccaaatttagcaccttatgtaatccgagcacaaagagatctggaaggacttccagaatgcccatcatcaaatgccctaactaatgacatcaccatgttacagctgtagaaacatctactagagggttcactgtaaaataacacagaaggctagggaagtgggcttagtttggggaacagggcattatagctactcatctgaaatctctgaaggcacaacacattggcatgacattttcccttaaggtgataccaccggaaaacaacagcagcaaaactctacaatgttttgttttaaggaaaacattagcaaacattgtgacattacaggttaaaacaaatgccttgtgacacggaccataaaaaaagtaaagtctaaacaaagtcttatcccatggttgtgtactcaaaatcggcttaactgcttcctcctgttaattcaaacttcagaggctgccaggattctaggaagcttcaaacccaccagttatgattttgttgacacaaaatggtctggagtttccagcccccagaggaaatcagagatataaataactctatgacaatctgttttagtaactggaaatttccacatcttcccatggaaagctagggggaaacaattctttttggtctcaggttggtggccaagaggggcctcggtccctctctggggttcaggatcccagggctgactttctaaggtgcagttgtgctggttcagatggagtcttgagaccaaggaggctgtcagtctggcaggctcctcgaggaagtgctgggtcatgatccaaagcatttgaaaagtgcaaacgacaggttctgcaggccaagggatcctcactcagagtccagagtgagggtgtcccatcagctgatctcaaccgccaaggccacaggtccagatctgggaagaagagaccacaaacagggaaataaagaaatcactattctgattagagcatacataacttctcaaaatagactggagggagaaacaactttaaaaaaatccatgtaatgaaatcagcatggctcaaagtcattcatgccatttcctctaccattgattgccccagtctaatttccttcctagcactattgcaagagccacctcctgccacccccattctatggaccacagacagctgtactgtgatgaaacatttcatagcatgtcagatgccctggagcttggagttacaggtggttgtgagttgctcaacatagatgatgggaactgaacttaggtccactgcaaggacctcttaaccacagagccattcccaggtcctttacttctgtttttaaaggctctgacagttccaacaagctgacttactccatgcactcactcgaccaagtgtatggccaagactgcaaatggatcccgcatgggtatatctgatttggctagtttgtatttaaaaatcttttcatcaactatttactaactagcagtcattacataaacatttatgtttccatcttggcagtgaccggttagagctgagtagcaggctacgttctccagttggccaccatccccactagttacctcagacctccttccatttcacctctgctctcaggcctatcctgtttcttctgtcctgagcagttggggagtcacttagagaaagatgctgagcccataggacctactcaagcaggtgcttctaggtcagggatatcatttataggaattgggattttcatgtctgaagaaatagatatttaatcaggcttgccagggctgatgggaaactgttgagtccagcaaatctaactgctgactcagagctgagagcaatcaaacctctgcgaggacctgccctatgctgcatttattccctggctctgtgctcagggtgtgggcccttagtaatggcttttagaccagttgttgggaaagggctgcgggctcacattaactctttttcatcccattggtactgacgattgccatatcttacggttgagctgaaggctttctagggttgctttctcaaatgctggctttggaattgtggtgctcgccacagtagaattctaaatcaagcagctcgaacatcctgagtttctgacacaaaggtgttttgaagtctgattctcctgtatcattttgttccactcaggtgccgcatgacatcattgctagcccacaaaagaagtggctctttgccaagcagactagacatcccattgtccctcatgactcaggctatctgattccagaagcacggcttcccaagctccacactttccattcaaccagcctgcaggagcctagcactctcccttctgatgtcccttccctgtcactgactccagctgtgagcctgtcaccctcttcattagccctgccctgctcccagctcagccccacaacctatttcttaaacactgttggctgcaaaaccctcagtcagttgtaccccagcagagttattgtctcactagtacattttgactgtgtttctaactttaccattacagacttcccactcaggataggaggcaggagaatttaaggatacagatagagcaaagaaaggcggaattgctccgggcctgaagtggatgccgtctttgctctccaacaaagacaaggagaggaaacacaaattgcaagaacaagcctagtagaacagctgccaattaaaacgcttctgtctgtgtacactgatcctattcaactttcatgaattaattagcacaaccgtggatacagttgccccttcctatctctgtgtttcacacccactgggttgaccaactctgggttgaaaataacaaaaacaaaacaaactgcccacaataaatgtttataggtaatcttccttttcctgtttttaagtattaaaatgcattttaatatttttacaagtaaagcatacagctatatgcgaagggaccagctccccatttcggcagccttaacagctgaacatgtgcttgtctgaccttgccttggccactaagaggtcagatgcctgccttgtggcaaggaaccaatcagaagttagctggtggagctatgctttacggctctgggtgtgctttacggacaagtgcacagcaatgacgtgcagagcatagcaaccaccctgggagggcctatgggccataacaaccaattggccaatcaacacagggcaagtcctccaagcctggaggcacaccaatcctgagcctgtacgtcgtacccctagacattccttatgctgccctacaagatctctatgtagcctgttcgagctgtcttttttagccatcagccatggcgggtaggtgaaagacccgagctaacatggggttagctcgttaaacaactttaataaagcctcatgcagtttgcatcaagctttcgaatccgcctggtgattggggtgactgtggtcctgggctgagaccccggaggcctgagctttcagggagtcttacaatgatgattattctctgggcacaagctagtcttaagatctgtgtgtgtgtgctgtctggttttatgtcaatgtgtcacacaaactacagttatctggaatgttgtagggcattttcttcattagttattgatgaaggtgggcccagcccattgtgagcacagtccaccccaggctagtggtcctggcttctgtaagaaagcagtctgagcaagtcttggggggcaaatcagtacgcaacattcctccatggcctctgcatcagctcctgcctccaggttcctgccctgtcctgacgtctttcgatgatgaacagtaatatggtagtgtaagcataataaaccctttcctccccaacttgctttttggtcatggtgttttgtcacagcgatagttatcctacaagaaggtgtaaaaaccaacagtgcacagttaaagccacactttaagccaccaacaccatcctgttccttctcacatctgcccaccgaggtgacagagaatggcacatcctttaatttggcaacaaatatggccaaaccgacaaggcccctggggatggctgggagaacagacagtaggcaccactgagtcccctggcagctattttcacatattttcacagctatccaaagattacaacagatccagagacaggactgcagagcagtgccatgagagagcacgtgtgcacccccctgggcacagccacacagtgtgcttctgaaaatgcatttcagggacagcatctacacagagtatgggagctgggcttttgctgggttagactatcttggttgtatggcactgctaaaatgatgtaggacagaacgcttaaacggagggctttaaaatacaaaattacaaaaatacatattttataatacaggaaataagaatatctgttagaaaaggaagactgggttttccagaggcctccatgtttggaggttcaaatttagatgctttacactccactcacatttacaggtcagggatgaaaacaaccgtatccatccaggccaggttgaggggtcctgaggacgtttccggagtccctaggacctgcccctcttcctacctagatcctaagtttcttccacctgtgctccatcccagagctgggtggacagccacaacaccttacttctgcacaagagagggctcctgagggcaggaaaacaaaacaaaacaaaacaaaaacaaaacaaaacaaaacaaaacagaaacagcaccagccctggaagatacgaagctggaacacacaaccatggctccagaggcacctttctcattattcctttactatcgctttctcaaagagtagaacaataaataggctttaggtaggcttagctggcaataagcagcctagagcagacacagtgtagactcttgttaccatttgaaggagaaatgtcttcacaggctcttgtgttttaatacatggtccctggctggtgctgcggttttggagggtgtggacctttaatgaggtgggaattagcctggggaagtaggccactagggtttggccttgaggttaatcgcttgttcctatcttacatcctgttccacggcacttcctatggaactgagatgtgagcaagcagttgtcacacttgctctcactgccatgaagaggcctgctgccgtgccttccctcccatgatggacccctctatagcccctcaaaccatggtccaaaatagacctctcccttcagttgcttcttgtctggcgattggttactgcactgagaaaagtaacggacacacccttgtttttgtcattgttcagtaaatcatggaatgcaactgctatctacaaagcatttgcactgtaataggtgttttaagtaaccaaaatgactccaacatgcatggttttggatctgtggcaggtttgtcaccctaggtctctcatagtgtcccatgctagagcaaaatgcttcctaacccttgcccggcctctgtgcctgtagactgctggcactgaagtgggtcacactgtggggaaaaatgatttcaagcctatatgcaggtgtagataggttatctgcaaatattgggccattttactgaagggacatgaggatttactaatttaagtgaggctacaaacaattcccatggatattgggggataattgaatttactaactcaaactgagatagagaaggaggtgagaaagaaaagcaaagccacgtttactcatcgttctgttcacttctgtactgtggtggaagaattcattgtctgcgaaagaaaaatcccagaaatgtctagtttcagtattattcctcccttttcactttaaaaataggtttttattaattctttgcgagtttcacaaatgcctagaatggattttgattatattcatctccccatattcccaatgtccaccccaccctcccaaacccttccgactccgagtcttcatgtgtgcggcccatttactcaagatatggaaccatccactggagcatggccaacttaccaggggccacacccttaaagaaaaaggattttccctccccccagaaggcttcaattatcattaacttctcagataggtgtgggggctcatgagcccctctttgctccatgctagaatgttttgaatgctgctcttgtacaggtggccagagctgctgtgaatgcaccaatgcagcagtcctgtcaatgtccagaagacaccattttgtgccgtgcctgtccttcccaacctctggctcttacaatctgtttcttcctcgttcatggtctctgtactagccggttttatgtcaacctgacaaaccagagttatccagaaggagggaatcttaattgggaaaatgtgtccataagatccagttgtaaggcattttcttatttagtgattaatgggggatgtctcagcccattgtgagtggtgtcatccttaggctggtggtcctgagttctataagaaagtgggccgagcaagcccatagggggcaggccagtgagcacctcccctccatggcctctgcatcagctcctgcttctaggtttctaccatgtttgagttcctatctgtcttagttagggtttctattgctgcaatgagacacaatgacccaaaggacagttggggaggaaagggtttatttggcttatacttcagcattgctgttcgttgctgaaggaagtcaggacaggaagtcaaacagggcaggatcctggggtcaggagctgatgcagagaacatggagggatgctgttccctggcgtgccttccatggcttgctcagcccaccttcttgtagaacccaggatcaaaagcccagggatggcaccacccaccatgggttgggccctcctgcattgatcactgaatgagaaaatgccttacagatggatctcatgagggcatttcctcatctgaggctccttcctctgatgactctagcttgtgtcaaattgacacacaaaaccacccagtacactgtcctgacttccttcaatgatcaacaggaatatgaaagcgtaagcagaataaaaccctttcctccccaacttgctttttggtcatgttgttttgctacagcaatagaaactctaacaatgacaatccatgaacttaaaggggtggggtatgatatagatgtcctatttgtagctgagctctccatagacaattattctctgaactttgagcatttgtgagcatctgtgttaaccaaggtccactgtggaaaggaacttcatgttaagatctgggagatgcactaatctatgactgtagagatacaaatttagagaacagattgatgctattgtccctttagtaaaattactgtagtaggctcaccatcagagcctacgagttctccgataggttcttggccacagatacagtaccagccatgcaattcagcctgtggagtgggcctcaaattaaatcagaatgtggctgattatgcccgtaacgttattgccactactacaccagtggttacattcttgccatgccagttactgttggagctcacagaattctcagctgggtaagatgacggctcatcaccaggaccattatcctctatgtagagtaactaaaatttctaatatgaatagatcgatcatatgaatacatagattagatgaaaaaaatatatagcctgtaaaatagtaggctcccatatggcttttttgaacatcttttttttgactgacacgtcatacctgcctgttttgcagtagaacacaaagcttggctgcttaatttatactaaggtgtggaaacctgatgtcagagttcctaagagaacaaaagctcacgtttgcatgatgagttgttagcatcaagtttttctagtttcactttttccttaacccctagtttcatgtgctctttcccctcaggttttcttccaggacttggcacccagctggctgaactgtgctgaacagcccctgttgcttcttttctaacgaggtttttactaaccccatcatgaccatcctgaccttgctggcctcttcaagaaagtttgcatttagaaggagcccagtggaactgctctggagtgttgccatgctcagcagcagtctccctactgccagaggccatgctactattcgccatgggccttaggcaaccagaaaccacaatctttggcttttggtttagattcttataaaattctgattttggtcctctaggaccacccaaaatctagtccttgggctagtgttagctggataactgctagttaccaattttgggtctaaaacttaggaacttaaaaaaaaactattttgttttttctgttatgaaaatgtgttatatctgttgtatctaatagaaatgtagggggggcgggggctaagaagataacttagtgaaacagttgatgcccaagcatgaggacctaagcttgatccccagcatctgtgtgaaaagctgactgtggtggcacatacttggaagacaaatgcatcagtggccagcctcagatcccagtggaatactgtgtggagaaaacaaggtatatggctcacaaggagtggtacccaggcatacatttgttcccacaggcatacatatgttccccagtcatgcatgaatgtgtatacacacacacacacacacacacacacacacacacacacacacacacacacacacgcacacctgaacatacacatggataaaataaaatacaaatataagctggaactactatgtccttgtggttttccattacaaacagaccacaagcttactatgtagccccagctgatctcaagctagaaatcctcctgcctcagccttctgagcctgggattaaagacatgcatgaatcaatacacttggctttccattttagtttttaagaatttatttactgtgtatattatgaaagtatcaacagcaccttgaaaattgaacacacacgggtgacacacacacaaaacctggctgttgcccagagtttgggaaacgagcttctcaagatctgaagacttgttccaaactttttccaccaagaaatttgtatgctattctctctctctctctctctctctctctctctctctctctctctctctctctgtgtgtgtgtctatgtgggggtgataactacaaaaatcaagcatttttgtagtacaaaaatgaccttatttaaaagcaagtctttgtgcttatgtaattttaccattcattaaagatgaaagaaaatttgtatactagtgacttggttgtgtttataactacgaatgtgtagaaaaccaacacataaatatacagcacaaattagcagaagtatatttagggctaattcagaaattgctggaaattctgtcctaatagcaaaccaaaatttatttaataatttttttagtgaaatgaaagccaacaatgaaaagttttaaaaataaaatatctaatgtaactaaatataaagttatgagtttgatacatgctgaggaatgatggtagaaaaatattaaaagtgttttgtgtggcatgtagttgtacacacctctaattagaacacatgggaagcaaaggcaggcagatctccgtgagatccaaggtagccaggcctacatagtgagttccaggacagctagagctaaatagtgggactctgctttgaaaagaaatgaaataaaatagtatattttttgtaattaaagcattatatttcagtaagataataaagctgtatatgtacaataagtcatgacactgcaaatcataacacatgatagtctctgcagcattccttcgtgtggcatagtaggacagcatgcacagtgcaaagcggtcatgctgcatgctcagaaccatgttgtcatgatattatgtgatatcacatgggtaagtactgacaaacacctcagattcactatacatttacttttgaattgacaattggtcattgcatggtcagacaccattcgccaagtttttttttttttttttgaatccccatttgtttaagccacccaaaatttaataaattctgtaaatctagactctgtagcaggtaattgctatatggtcctctagtttgacattacaacaggccccaacatataaatgacaacccactcaattctttacattaagatttgttccttcctcctgtggataataaaatccagatcaatcgtttttacaaaaaactatttttgttatgaaaaagtcacacgttttagaggctgacagatctgtggaactgcatttgagtctacattgtgtgatttcaggaggtcacgtggcttttctgactctcagttcctcatggggaaaataaaggcaccattccctgccttaggcaagactcaagattaagagaacagaagtttaggagggatttgtcacagtaccatgaataggatttcctgcagtgacagtaatgctgtgtatctgcagtgtcccatatcgtagcctctagctaccatgtgtgactgctttaaatatggctattaagccctaaactcaaatggccacagctggctattgtgtccgttagagcaggtctggcatgctcacctccagatagtagactcaatgtctactattttagtgagcactgtagaatcccataactggctgaagcccagagtaagcaacgacagaacattctgctttaaatggtatatctatatcaccccctccaaggctcagggaacaatatgaaagagggggaagaaagaatgtaagagacagaaagtggggacatgagtaacacaaagactgacatagacactgcactcctggacccaggatagcatggttatccacttaagtcctgctcaagactggtcctgtcaaatttcaccatggataagagaggaatctgcgatgcccacacccttctgagggactattggcagtcaatggttgctgtggtgcagctactgatacattgacttttctttaaacaactcccacccatgctcctgcaaagaactccaattaaactcagtgagtcacacacagaaagaagaaatgaaaatagaggaggcgcttgttgggaagaatgtcagtcggaaaggaaggggactaggagtccggaatgggggatgaaatgcctacaattcattatacatacatatgcatgtatgaatagaaatagaataaaaatagaaaaacttaaaattttattaagcatcatcttacacataccagacaatgttttagatattgcaaatattatctattgacgagagaaacaccatttccaagaaacttaggcgtagctaataaagcagaacttgatatttttgtaggggaatttgcccaggtcttctctggaaggcctcgtgacactctggatccttgaactactgaatggctaataagacattttatgaaccagtaatggctgtcctccagcaggcactatgagttgtgatactcaggtgggtaaatctgtatagtggccatggagactttcagaaaaaaagggacagagacatctttatctttacttcagtctcaggaaaacagtggcccaaaaaactgaagatggagaagttaaggctcctgactcaggttcttcatgagcatgttgtgtggaaggggctaatggcacagcagctgagaagtcaaaaagcccctcctatctcttcagccatgacagtttgatgtgatctttatggggatctgctctggcaaggagacctttgcccagcgaatgtaaacacctggaagaaacggagactctacatggcagtactagagaactatactccacagtggttgtggactacagttaatgcctttcacatgctacttgccactggtcccaacacaagacacacaaggctgaagaggtaggtgggacttcctgtcctggccacagttgcgcacagtcaatgacttacacatgaggcactcattgacaactcagatggggccctctggtaaattggcttagctccctgggaggctagaagaggacgtaagatcttctggagctggagttacaggtgattgtgaactccctggtgtggatggtgggaatcgaactcaggtcctctgtaaggcagctctcttaactactgagccatctctccagcctaatcagaatggcatttcacagacatagacaatgtccttcaatcatatccattccctttcacctgccctggacctcctccccttgtgcaggtgccctgtccatgtattattattttttaaagtctagaatctctatatgaaaggaaacatattatctgtctgcactgtttgagttgggattaaaacgatgacctctattttcattcatccccctgaaaatgacaccatttcattttcctttatggctaaatagtgctctactgtgaacactgacggacacctgggatgattgcataacttgattattgtgaatggttaagatgtcccttctgagtgactagggggtcctcaggcctcaggccaggaaatctgtgtgtgagaggcgggacctaagactttagtgatgtcacaagggagcagaaaagatttaagtaaaagtcaaggtcctgttgaaagtcactatttcctctttctttgcttttctgctcctttcctgtcacaaaaaaaaaaaaaaaaaaaaaaaaaaaaaaaaaaacctcctgtctgcttctctgtctttttctctcatttctctcctgtctctctccctccccgttcttgcccccccacccccgtttttactggtctcccctctttttttcttgctttctccctcttcctcctttcagttttctttttttttctcctgaggctaggtttcactgagtagcccaggctgcctttggcagcacaatgctccagtctccacctccccctgaatgctaagatcttatttccttttgacaacagttccttgaaatctacagttagaggtctcattgtcagccctgataacacacacaaagggcagcggacaaaacacaaaatacttcaacagatgaggacacagcgaggattcagtgtaggattcaatgtagcctccaaaacttcttccccttgctggtgccacacacttcaaataaattagtcaaagacgccatttcctttttgacagacaaagccggtgtagatatggaaagaaattcactgggtgctgcctagatcccactgagaaaaaccctagacaggtctacatatattctggggttcttgtggacttcaggaagtgaggaacagagactacagacagacaccagagcagctctatttaggactcaaagccctagctggtccaatcaaataggagcaggatgataaaaaggcccaggctaagctgatgctcacaaaaacctcccagaactgagaaggttaccaaatctctctctgttccttacccagacagaaggggtggattcctaggagaccaggaagatttaacctggctcatgcccagaacaagaaaaagaatgatggaaaccaacagaatcctcagagaggctcctggctacctctcactggcaaatgcagcctatattacccaaaagacagcactttggaggctcagagcacaaggcaaacccttttagtccagaaacaaacatccccttacgaaaagtctgcatgtggatcccagctcatggaaaactgaacctttttcttcttggggtaaaatgtctccaggattgtctcaaagccctcctatgcttgaagtgtttcagtggagcctggcaggtcgaaggccactgtgagtcaagcagaggttcacaccttggctcacaacacaggctcatactacttgcaagtcactcacctatgtctagaatacagctttccacagagcttcttcctcagggctatcactgcggctatgaagattaaagcaatgatgcaaaacgggatgagaacatgaagtggtgatgttctggggaccttgggttcagtccaacctgagtgaagggaagaataaaaatcccatcacagggtagctcatagccagactggattggctttctgaggggtccccaccacacagggttaagtcttcactccacacctgtcccagccacccagtgaagtagcctctactttgctctctattttcactggtgaaaaaagcgaagctgtgaaatctccccaaagttagactgcaaggggtttagctgaaatacattccatactgaccgggcccagatcctgtgccctttgccgctttgtcattccatccatccaccaccaccacccccatctcttttttctatctccatttcctttctcttcatcaacctgcctttctcattcaagcaggaaaaaacccctcagctcaaaaattaaatttctccctcaccgataagaactcaagagcttagaagtaccactagttatttgattttaaagactagcaagatcctttgggaaaagcagaacatcccaggcagtggtgatatattaaatctagccattcaggttttggtgtggatgattacaactgatccttagcttgtctggactaaccaaggtgctggtgctgaggacagcatccatttagtgaagaggtgatgagaagagtaatttagaggctgggggacagttttgcagcactctgggtaccttcaggttggtcagatggagagaagaaaggactaccggagtgttcacaatttggcaatgaaaaggcacacaggttaggctgtacctgtttccaagactggaattttgcctcatggcatgatggacacaactactgtacagaactattcaggagggagggcttgaactgctggcaaatcaggcccctttgggaacctttgttgggttcaagtttcctcacagatcttccatgtgtggagtttctgctcactcctgaagactccagcctccctagactgtatttggagggcaagcatggcacccaagtcatctcttagtcctgtatgaagcctaacatcacttcatgagaggtgtcagtcatagtttctgggctgcacagactagtccacctagctggtcagtagttccttgtggcaatctgttggttatttttctcatccactccctccatcccagcgctaggttattagctagatatgattcctaaagactgcctttctagacccatggaccagcatttaggtgtagccagtaacaaaaactaagttcagacaaagaatgggtcttctggatcttgactgtaaaacatcagaggtctctcccatcactttttcttctccaaaggcagaaatatggatttggcagtgatcccgttcggcatttcaacagtgacaacatccagaagaatggcagagcaaaaagatggaaataacctgggtcactagatgacttatggaatgtagtcatttagctgcttacagtactttctttatttgagtattatgtaatggggaaatacatggctactttgagtcattgtatgctcgtttcttcattatgtctgcttagcccacatattcttcaatgttatcttatgataactgcattctctttaacaatgataagcaatgggggaaaatcaactgtactattcttaccacagacccgtatgctcagaaagaagccaggaatcttattggtggtaacttaggttttcttcacttcacccttcagtatcgtgtttcatttaattaccacagtgactttttaacatttgaaatttgtctggtttcagacaaattcttttctgctgcctggattccccccagatgtgccaggagggcttcacttttctgccagccccgccaggtattttatagtcactcccacagtgtagcccagttacatttcccattgagaatgtagcagctggctgaggaccgctctgtttctaaaggaaaatgacctgataactccctaacttctgaccaaaattcagtgtgttcagccttctgtcctgagtggcaggcatcttcccacgcaccgactctcatttctgcatctgctttattcaccgacttctggagaagcctgacgtggttcacagaggacagcagtgagtgagtgagcgagtagcttagttgatgagaatgagtagaaacgggagagttataagtcagccaggcaacacctttgggaggatgtgtgactgtggttatcctgctgctatagctttgtgtcacacatcagggcatcgtctctgatctgactgtccacacagactaggagctgaggtgagagagctggggtcttcaagatggtgtctcccacccaacactgcagcatttaccaagtactcctcgtgggcaaagcaatctgctttcactttggtatggatataaagaagacccgtgtcaactatgaaaacacatggaaaaacacatacaaaatgcgaaaacataccacacagtctcagcaaaataagcaagtgatgtggacgaaagatcttgatgagtaagatgagaatctgagtctgaagtagtttgcgctgtcttagggacagggtaggcttgggggctgcaaataatgttgttttatggaaaggagcttatggcacaaagaaggtgtggaagtgggaaaggtattgtaacagggtcccagacctcagtaggcccccagaccttaacacaactgactccatgcaggaagtaccattcagttcataaaactcagcacatagacaataccacctgcccaaatgaaaacagagacccgatccatcaaaattcatactcctgggaaagtctttaaatgtactaaccttgctttttggcttttatagctctgcttctggctaactgttcttgtttactgaagtgtgtcaacctggaatatagtttttgttcttaaaaattcatcctgagaaatgcctggggctacgctgggatctactggccatctggctaataaaggctttctattggcttaaacccatgtctgagcagtcttttctggtgaataccccacaacatttctggaggtttcacagagaccagacctcaagacacagggcaggggtgtctctgagctgcttggagtgaggcagtgtagtcctcaggggactcctggggggtacaaaacctgaattatgggtctctagggctccctttgatcaattgatgcctagagctttggaggagtctgacagctccaccttaaaaggaaacaaattagaaagctgtctggtttgtcacctcaagaggtaagactggtgaaggccgcaccttctgtttggacacataggagaggtctgacgatgcatctactgattcagtgtccaggatccatgtgaggcgccactgaattcttcctctgttcaggttctctctctctctctctctctctctctctctctctctctctctctctctctctctctctctctctctctctctctctctctcgtctgtgtgtgtgtgtgtttgtgtgtgtgtgtgtgtgtgtgtgtgtgtgtgtgtgtgtgtttatgtgtgttctgtttcctgttttgatcagtagctttctctgggggtcagaagcccgtggcttaaggccagtgcccccttctgttgggggcctgaatccttttggatattccaggttgcccagagaacacctccccaaaagaaaaccctccacctgttccactccaggatcagaacacttgcttgtttcctgttcagtcagggttggctccatgtggaggtagggaaagccaggcctctcatccagggcccctgccatctaagaggaaggcacacagggaggggagatagttccctgtggtgcacactccctctgctcttgctcctctgcctgctctaagtaacccaggggaaagaggacgtttactccatctttcatgattatgtttcctgtcaaccaattatccatataattgaaaaactgaaaattagcattttcagtagaaaaacccctgaggcccaggcaaggaagttaccaaagacaatgctgccagggcagatggattttcccttctgcccaacattgaccaagggggcattattttcctccatttttctttttacttaaattagaaacaagattcttctacatgtcaatcaccagttctatctccccccaactaacaccctacctatctcataccctttctgctccccctggagggtgaggacttccatagggggtcttcagagtatgtcatagcctttgggacagggtctaggcccacccccatgtgtctaggctcagagagtattcctctatgtggaatgtgctcccaaattccattcctatgctaggggcaagtactgatttactacaagaggccccatagatttctgaagcctccttactgacacccatgttcatggggtctggatcagtcccatgctggtttcccagatatcagtctggggaccaagagccccccccttgttcaggtcagctgtttctgtgggtttcaccaagggggcatttttcactgggtcctttgagagctatacttgagtaagctctgtttcgctggctgtggtgcccgttaactggtttgggtgacatttccaagaaaaccagtctcttactaaattattcagagtttgactggccatgctagctagctagctctggaagtggatctcagcctttggattcctgcacccacaaaatctcaacctatttggacacataggtaggagcatctaatataaagcccaagatttaagagaaagagtggaagagtctgctaaaagggcagaggggtgtgggactattgtcttaagatgcaggaagcagttgcaagccatgcaatatagatgatgaagatggaaaaggcaagaagtctgtgaaacctatgttagacttcaaacttccagaactatgagataatagagctttgttgttttgaaccattacatttgtggcaattcaatacaggagcaataagaacgacatacagagtaaaaaaaaaaattcctgtctcttaagaaattgttgtttttctagtggatagattttagttctcaaacaaatgtttatatctggcacaaaaaaggtactggtttattcaaacaggttcaaatttggctggtgcagatattcaaaatgatgaaatccatttctaaaactagccagtcagactgagagatttttttttttgtaggagagcagtttctcagggataccacataaccaattagccagcagtatagccaaccaaacatcaaccatgctattcacttgtttcttggacaaacgaatcacacaggatgtttctccggcttctccaaatctgttttctagggtgtaacattatcctctgagatctcaatgttgacctttctggaagaagcctgtggatacatctttgttctctgatctcttggtagccgctccaacagtgaaggactcttgctcaatagagatgtttgtcctgttctatccttgtaattattctagattctaccttgacttcatgaagagtcccttcataacaccttccttgaatggcttgtgtgagcacaccatctgtttctcacctgaactctgattggtagaactgggaagtggggcctgcacttacccagaaggccaatgatggctgatgtaagctccttcatgtgagcattccagaacatgcagctgaagtttctgccaggttggggctttaggcgcaaaacactggtgacctggtagaggccttcaggggtcctggtgtggctggtgttggcaggaacactgacgttttgccaggacacttctgctagtgggtaacctctagcctggcaggtgagctgcacctcccctgtccctgggacctctaggatcctagtgtctatcttcttgtaagaagctggacaacagaagaaaaagaagttttattctgattgctgtagaattctacttaatgcaagaggaaataagatgatcactcttgatcttagataatacatatttttaatttaaaagatattttctatgtcgcaggtacattattttgcatagattgaatagtttaattagtacaatactacaaagatgctatattgatgtctctagtctttgttggggttaattgaagatgggtatgttgagagtggtgtgcaaagtcagaagaataaagagtggtagacccaatgtttgaaataggaagactacaaacttatatcttagcactatgctaagatgccatattctgtggcctcttgtattctaaacagtctcagaatcaataggtggagagaggtgagaggatgaatacacaattagcactaaataaacccaacagatcacttctccagacattgtcagtggaaagtttactcaaaatttccctttccttctgttatctttgaaattaggaggaggaaaataaggaccctataagagctgtaagtaattaagagttgggtgtatttattattacttctcaatacagacatgttctgagcattatatggcaaatgaattatttctgtgtgactccctactttctagaacatgaatatctgaaactgaaagaagacaattggagagtcaggaagcacaaagactgtccaacaatcttaggtcatacctaaaaatgaacaaatattaacaccacatgtatagtgttgatagtaaactgtgcactttttggtgatgtagcatgtactggcttttattaagtgggaattattcccttaaagagacatttagcacaatcattgaaggaaaagcaattttgaagtgaaaacacaattgttgagatggttaatcttgtcaacctaattggatgagaagctcccaggatattggcaaaatgggtgtgtgtctgtgagggcttctccagagagaattaactagtgggtgggaggtctaccttgaacatgggcagaaccatcccatcccaacgaactaaagagaaaacgagtcatgatggaagttctgctgtgtgtaccctcctgcgcacgtggactgaaacctctgaaagcatgagctataataaatcctcctgatcacattgcttatgtcacgatgtcccgtgtcacaatgatgaacagtggctgctaactgctgtgtcacaacaggttcttatgctaatagaatatgtccaagcatgaaaaaaaattttttttttggtttttcaagacagggtttctttatgtagtcctcgatgtcctggaactcacttttgtagaatttgaggctggcctcaaattcacagagatccgcctgcctctgcatcccaaatgctgaaaattaaagtgggaaattaccaaatagagtagccggttgtggtggccaacgccagtaggctttgctgaaggaagcagaggcagtcggatttccacagagaaaccctgtctcagaacaacaacaaaaaagaaacaaaaggaagtaaaagtagaatagtaaaaaagccacctagagatgaaaaatgcacagagaatctggatactaaatgccatacttaaaagtagagaattaaatttagcacaagcaagcaggagtacatgtgttcacttctttctgctctccaccctggatgagatactgagttcctgccttgatttcccctcaatgacagactataatttggaactggaactgtaagccaaataaacccttcaaatcttagttgcatttcctcgaagtatttgatcatagccacagatatgaaactagaatagggtttgaactggaagtctatgcttccagatcaaggtaagggagcaaggaggaaggggctgtctgttcttacccatgctctccaatgtaaatcatccagtggtaccccccaaacagggagaggagggagcatcgtgtagtcatgcagctatttgcttaacacgtggtgttcatttcccatatgactgtacattcttgtgtgttgcttactttttcaaacacttagctgagagcagagattaagggaccataatacccggtcctagctctgtaactagacattatcttatttaaagtgtacaaggactccatgaggttggtaaaatttggcttctttgcttgtaaacaaggaaacaatagaaccgttgagatgctggggaggtatgaacccctacattttatcacactactttgcattggaaatgccataaaggaataagaagcaacataagcaggaagaatgcattcccttgatagatctagtaatacctagaactcaaagaaaatgaagagaattgggttctgacagtctactgaatgagttggcctggtcttatataatcttcatggaaccaagttttgggctgtctctggcaaccaaacagtatctaaagcaatctttggaagtagtcactttacgtcttatttagccagactttacaccgcatcttatttctatcttttgtggattggggagtaaattttttaaaaaagcaaaaaaaaaaaaaaaaaaaaaaaaaaaaaaccagtagtatgctgtaggtgaaatccagacaactcctgcaggagagctccaaatctccaaacaaaaagaaactgatctgggctgagcagagaggtgattctaaagatggaagacaggactgagaatcggggcctgctgaaactctgcctcgtgacatgtagatgtagggaaagggatggatattcagctaaaagaaccatcagggtttgggggaaggggtggaaacccacacttacaattacagcttccatagcctcctttttattggggaagtggctagagaggcatcacccccagcaaggcataatagggaagctaggcttttcttgagaaaagatgaacaaagtttagagtttcagtgggagaatttaaagtccacgagttccaacttcctgctcaatgagaagtgtcttctctggcaactttgttagttaactaccttggtaagtgttaggcacaaacctaacagaaacaacaggcaatctgaggttggtcaggatggataagtgtgttgttcaagtcttctgcttcatattttgtcctatctgttatagcagagatgaatcaaatgacagggatgaatcaaaggcagagatgagccaaaagctcacatacatacttatttgtcattgtcatcattgtcattgtcttcattttgtcttcaatttgtttttgaacaaagagaactgaaatttattaagaaagtgagaaaagcctaagaggcctccgccctatacaaaggactacaggcaactaagggatgctgagagtggagacagtcttcctcagggaagagaacaatgattggttaaactaaatgttcatccctaaaaacacacatgtaagtgacattgtacagaccgagcaggttgtattcatgtatgcagaatgtgtgtgtgtgtgtgtgtgtgtgtgtgtgtgtgtgtgtgtgtgtatacatatacatacacacatatatacacatatatgtacatgtatgtagcaacatatgtgtgtagcaacaattaatgaagaaactaggccacgactttgaaaaaaaaagtattgggagggtttggatagatgaataggaaggttgaaatgatataattatattaatctcaaaatataaaaataatttaaaagaagttaaaaaaaagaactgagactgggtggggctccaggggaggaatagccaactttccaacttatgtctaatataatgaagatatattgtcagatgcacatacatttagaatagccatttctctctgtagagctgattcacatcactatgaaatgtggctttttaaagatcctgccattctttttgtggcatggaagaactgtttaaaatgcagattgtattgacattttcatacatgcgttactgtacttggatgacagtcacctctccattaccctcagttatatacccccatcctttcctctggcaacccctttactttgatggcatccctttccctcttaggttccacagatgagaccaaacatatacatttcttcccaagtctccattatgtctctttatacaacagtttccagttctatccattttcctttaaatgatctgattttgttcttggttataggcgaatacgccgttaaacatgcatacattttctttatgcattcatctttatgcattgagggcaactagactctgacttggctattgtgagtagtgccacaataaacatggtgggtatttttattctgtgctgagttagacttctttgaacatatactcaggactaactattatagctggatcaaaccacagtactatttttagttttctgaggaacctctattctgattttcactgtggctagaccaactgaaaaacactgtcttttatctttagtaacatctatttttttctcataatagcaatcagttagctaccttgtagttatatctataaatggaagtccctacttcccccagaagctatctttgccatgagcacaacaagtaactgaacttccaagtgggaagctcatttttgtgtcatcagtttcatcccagagacacatgtttggctgagtaaaacacatgtaataagctcagtggctaagaacttggtcttataaatctgaaaggtatcagccaatggctggtgacgtgatctttcaaactcccagttttctcattaatcaaaggacacttccctccatttctgtctttgctctggtggtttctatagcagcagaatcatttcattcctggcaccagctctcactgaagagtctatgaagtgatcatcctggggtccatcagccctggctttcccctttatctcttccttggcaccattgctgatgtgactcggtcccttggtcccctgttgacttttcagcctctaaccttaaaagaatgataactttctacttttaatttctacaaatttcatggtttctatttctctggtttgtgtgtgttggggaggggtatgtggtatatgtttctgtgtaatgtgtgtgcaggcgggcatgtccacattggaggtatgtggtatatgtggcgtatatggtgcatgcttctgggagcgtgtgtgcgcgtgagtgcgcacgcgcgcgcacacaagctcgctcctgcatgcatgcagatggacatgcccaggtgaagatcagaagaaatccctgattgtctttcttattctccactgtattcccttgaaacagggtctctcactgaacttgaagtttactgtttttggccagtctgactctggccagcgtgctctcagctcctgcctgttcctgccctataggaggatacagacatgcattgtttttttgattttttttttttaacgcgggtgctacgaattcaaactcagatccttatacttgcacagtaagtgctcttacccatctctcagcctccatatcacttgtaagacaagaacaatctgtgcatacagtgttattattttaatcatcatagtgactgcaaatacggagggaaacatagttcttatatgcttttgtcacctttctacccatggcttctcttcagctgcctttgctaggccctttgtcctcattggtggtgaattccctcaacaggagccgtgctgcctctttcctcagcctgttgaagtcccactcatatcttctcgggctttggttgggttaaagtactgcattccccacgatggctcatctgtttctatgcttagctccagcttgactgtggcccagtgctctattgctctgagcaggcctttgcaggcctcttctcaacctcagcagctttgtgaggccttggcctctctttcagtaccactgttactctgcttcagcaactctcccgcctgatggctcttagtcacgtggctacagcctagttttccggaagccaccatctcttctggatcatttcctctttctgcctcatcatttttctatcctttagaaaccaacgcttttccttatatttaatatgagtcatggtgtggaaagaggtgttacattcctattgtccagatctatcccctagatttaaaggtaaaactaaccctttctctgctcatacttcgtttgtaggattcttccctgggtcccagatctgagcttcggcatcaccataagttactcttacacgttagtctttaacaatgctctctgcttacactcctctgatgaaaatcaggacacagtgttccctcttgtatgtcacttcgattctcagacttttccataagcttcaatattgaaaaatacatatttaggattttacaaatatttgtattttcagcaagtaattgttttattcttacaacacacatatatgtttggtagttctctgctttatcattcttaactgtcttatacttaaaaacactatgtataactattgaaattaaatgtttccttatcactgtgggatttcaggtgttcaaagttaggaaacacccacaactatatgatgatcagattatttgattgtgtgactgaatgaaagatctattgaatataattcgatccaatctactgcaatgattcagaaatgatttcgagatctttccatacctccatcaaaagggtgccctgtcaatactgatggatacagcacacagtttcccacactctactgccctccctgtttctgctatttaaaggattatttaaattaacttggcttttaaaatacaagcaaagaggtccctctctataggcagaaacccagtaacatgctagtaaaacagaggctagaaacaaaagcaaacacgttttaaatttaagttctctgcttgtgctgctcatgttcttgagagcttcctgccttagtagtagaagaaatatccatccccaaagaatacgagtccagttagaaaacatgtagtgggggattgaagtcaaattaaaggggaataagtttctctttaaataattcaactcccttagcctgtggctctgccccacaagaaattaccttacatatctctgagatatcctgggaaacgctgcaaatagatactacagctttttaagtcaaacaccaatgggccctgaattgtaaccatattaactctattcttggagccaatgcctttgaacaaaattataaaatcctaatgacaacccatgtttcaggtcaagattacagtgttaaagaatatagctataaagtcccttctgtgaaatttgacctgtagtagttaaacagttccttttctttttcctttgattttattgatccaaaatagtgaacatccatagtgggttcatatgacttggtggctactggtgaaagatagagaaatactgcactggtcttagctgtggactcttaggcaagtagattaacctttctgtgcctcatttcattttcaaaagggaggtagcaatgccacctgtctcactggcttgcgtttggctggtgtttttctaataaagggatatccttatcataagctccttttgttccttaataggggtagaacaggcaacagccatgctgctctgggaggcatggggtttcttttcacacttgtctggcactgtggaggttttaaaccttggggcaatggatcatatctgtgaagggagacaggcctttcataaagagggagaaagcaaaagtaaaagaaggggtgtttcaggggaaccctaaatgctttgcctggcggtacattctcaggttcatcaatatgggaaagagacaggacaatgggaagcctgtgcttcccttacagaggctgtggggatcaacaggcccctccatgacgaccattgctttaaggaagaaatcttcctacacagggagtcctgagccccgcagaggaaaaggcaggatgcctcctcattctgacttcctttcaccacactgtgtctgctgttttaaccgctttaccattacttatacccgatgccaaaatatatttcctttcaggtgcttttttcccctttgaagcagctgcctctcatgtggagcattattgtaggatgtaatacatttgtttatgcggtggaacatttgtttaatgatgcaaagatgtattgcattcttttatgttgcatttgtttaactctgtaaagctgtattactttgcctgtcaaaaacacctgattggtctagcgaagagctgaacggccaatagctggacaggagaaaggacaggcggggctggcaggcagagagaataaataggaggggaaaatctgggaagagaagatcaaggagtgagaaaaggagaagaaggacctcaggggccagccacccagccacacaattagccaaggagtaagaaggaaagaaaggaatatagaataaagatacaagcccaaaggcaaaaggtagatgggctaatttaagttaagaaaagctggctggaaataagctacactaaggctgagcattcgtaagtaagaataagcgccaccaccccccccaaaaaaaagagcaaagagccgaaagagtaaaaaccaagtacagcctctttcaaccaggttttcggcttttgcttgagctactactgaaagtagcatgctattgtgtgcatttgtcacaaccctccatcagaggtgacttgcaaacactcacctttgaccttcaccgtcaggtacttgtagtcccaggcagccccgcagatgaccagacagcggtactgcccagcatctctcaagtggacactggggatgtggaacaaagccttccctagtggcagcgcctcctccagcagggtggctctttcactcagcgaagaggtatcgttttctaccttctgcaagctggctctgatttctccaagctccgtgcattcactgaggtcaaaatcacactccaggctcgcgttgctgctgaactctactgtgtacacttccttggggactgtcactgtgaataaagctgaaagggaaagacagcttgctgttgtctaattctgtcacatctcagttcttgtagaaccggagctgtgctccacccctgcgtgatcttccaggagacccctgtcattctctgggctttcgcatggctcctcgcttcccttttgtcccatatagaaatggcggagttcttgtctcagcacgctgaggtggttttcttctctgaacattcccacctgcacagctgatctccactcttgcttctcctgaacaccccaggaggagcttctgatgggcaggcctgcttgcccccaacatcccacctcagagccctgcagtcagcccagaatatccctcttgtgagaccacaggctgcccaaccattgagggctacctacattttattaattgtcattatatcttatcatctgggctgattttattttgttttaaaactctctttgccaaatatcaccatctctaaccagtgatagtaatggcatccacctcttacagagctcttagatacacttagatacaccaacacctcatttagtccccctggaagccagtgagacaggtggcattgctacctcccttttgaaaatgaaatgaggcacagaaaagttaatctatttgcctaagagtgcacagctaagaccagtgcaatatttctctttcaccggtaatcaccaagggcttgtatacatgcctaggggctgctgagaggttggtgaggatgtgcagttctaagactgtctctgggattaaaggaaatatttgatatcagttttataaatgataatagatgtcttctgctattaccccctgtggtggcgcacgctggtaggatttgcagaaggaggcagaggcaggaggattacgagttcgaggccagaaaaagaggctagggtctccacgtgcagtcgttaagaagcttcccttaagtcaccttggctttccttcaccacgcccttatgggcgagtcccggatccacctggtacctgtcccaggactattgggcggggctagggtgtctccctacaacccccactgttggaaagttatttaagaggatgcttgaataaaccgtggactccagaatgaactgagagccctcctgaggtgacaagatgtctgtgtttcatccttaacgccgctgggtagctaggagtttcctgatccacactcccccgctcagggaaggacctggggctgttcggctggttccaattgcagccccaaagacatcagtccggaatagatggcctctgcagcgtgggactgatacaggcccgacctgtcatcatatgaacctactatggatgttcactattttggatcaataaagtcaaaggaaaaagaaaaggaactgttcaggccaaatttcgcagaagggactttatagctatattctttaacactgtaatcttgacctgaaacatgggttgtcattaggattttataattttgttcaaagacattggctccaagaatacagttaatatggttacaattcaaggcccattggtgtttgacttaaaaagctgtagtatctatttgcagcgtttcccaggatatctcagagatacgtaaggtaatttcttgtgggacagagccacaggctaagggagttgaattatttagagagaaatttattcccctttaatttgatttcaatcccccactacatgttttctaactggactcgtattctttggggatggatatttcttctactactaaggcaaggagctcccaggaagataagcagcgccagcagagaacttaaatttaaaaagtgtttgcttttgtttctagcctctgttttactagcgtgttactgggtttctgcctatacagagggacctctttgcttgtattttaaaagccaagttaatttaaataatcctttaaatagcagaaacagggagggcagtagagtgtgggaaactgtgtgctgtatccatcagtattgacagggcatccttatgatggaggtatggaaagatctcaaaatcatttctgaatcattgcagtagattggatcaaattatactcaatagatctttcattcagtctcacaatcaaataatctgatcatcaaatagttgtgggtgttttctaagtattttcatttagtgagaggttagcttgggttcagatcccaatagtagcctgattagttaggagcctctgagtcagggcctgtcatttaacttctacgagtctgtccgttttcttttaatgaggctagtatctatctcttggttctgtgggaaaatgtgggcaaggtggaacatatgtatcacccatatctgtcagctagcaggcactcagaaaacattcttccaggtgattgtttagttcttggggtagtagtaatccatatacagaagggcagccgttctttattagccaggatgttctgtgcctctttccctctcttccttcttccctcccttctttctctcttcctccctccttcccctgtttgcttcctttcactgactgacagggtctcactatgtagccaggctggctgttacctcagccttctaggccctcagattgtaggtgcataccacaattgcggtgaactagggtatcaattaaccaggatgcttgtccattccctgaccaactccatagtctgagtaattctgtgtttcctgctggttgatgactcacactgcaattctcttttagattgtttttgtttctaagacagtgccttgctaggtagccccatatggtcttgaacccaagtccttccaatctcagcttccagggtcctggaggtggtccgggtgtggtacaatactcagtttacaagtcttttctaattcaaatatttccttctgttatcctccagacctaagaagttaatgataagattaagtttgctttgatattttttcctagtatctagcacgttaatctcagctatggagaatcaggggagggaaagggaagagtagtgaagaaaaagaatatgagcttgattatatttatttctcaccaaggtgtattttgcaacagatcacaggaatcagcaattcttggttagcatccagcatagtggatggtgatatgcaccaatgagctttaccaaaaatggctggcaagtttatttcctccattctgtgccttaactacaactagaacattaatgtgcatctctacagaggtctgtggtacagagaaggtgcacctatgcccagcatttgtttgtgcagcacggggctaggagaaagactctaaggtgtgtgctcctttgcaaaacattgctaatcctgcatgcccttgctggatcaggctgagaagaccctgggatcatattagtggagaaggatgctgtagttcaggaattcctgtatgattccattttggagacttcactgcatgctgaaatcacaaattcctatgtgccttatgcatagtttccataacaggaccctctcagtattaagatctgttcttatgggaactgtaatagttttctcaatttgatgggatttggaaacatgtaggatataaacccctgggcaagtctgttaacgggtccagagagaggcttaattgagcaagggtcctgggctaaataacaatgagaaagtgagctgagaccagcatccatctctctctgcttcctgactacagatgcaatgtgacagctgcctcacactcctgccaccgtgccttccctgccatgatggactgtgtcctctcaaattgtgaaacaaaataacccctttttcccttaagttgcttttttttggcactttaccccagccagggagaaaaatggctacaacagaaatcatctctaaatccttcacttccttataactaagagatatacaaaattaacaagagattgtacaaaatccactctgccctgggaggagttgtaattattaatcactcatcaaaaatacactagctactttctgagcatttaatgtaggaatttatttctgttaaagcacatcccccttttaaattacagacatccaaacagaaaacagggagatgggtgtacaagaagtggtagttgtgtgtctgagtgacagggctggatgcgtgtggagatgtgccgactgactgacctgactgacatagctcatctgtttaccactctacactttcttctcatgagaggcacaggcacttcccctggaactccccattaaacagaacttccccatcacggccctgccttatacagacatggcttctcttttcttttcaactgttcccccgctctgctttgtcgagtagatgtcccagctttagaaataaaatgttttacctttcagacaggtggcatttgggggctaacattcataagtgggtgagcaattaaccaacataaaccatgcatcaggtttttgaagtttctcaggatgactgagggttgttatcttgatgaattttgactcaattatagcttctaagatgtgccaagtcttgggcttgattactcattataaaatgggtagtttaggagaaaccacatactttttttgcaacatagttttgaaatactataactttggacttttggtgtcatttcatttcacagaggaaatgaaaacacaatcaagtctgtgaagagctcttcttcaaggctgtgtgcacgttagagtaaccaagcagaaggcctctgtctgcctgactcaggagtcttttgggacactgcctcaacccattctctgttgttttaacaaaacacgaaaggcagtgaactttatttctaatgagggtcattgccttctgcttcacctgagcactaattaggatgcagatgctcaggtttgccccaaatggagagaatgaggatctgtgaggcagacaatggcattgctgcatttggactgtaactggggataagtgataattgacttttctaaatgatccccacactataggaacccttatatatccatcttattggctctcccatcaacctgtcaaagtgggagatacaatccatgtttaacaggtgaggaatctgagactttacaaaggacacagtttgcttaaggccaatgaatggcagccatggagctagaattcaaattcatttctatgttcaactcaatttcatctgtatgctcatcacaactctcggctgtgaatctagcagctactaccagattttactagtcactaccagattctaccacctactaccagattctatcagctactatcagatgctacagctactatcagattctaccagctactatctttgtaaacagacaatttctgtgattgaggtaggtaaacttttggctttacgttaaggtagacatgttttgtttatatttcatgtgccacgtagcagctaaattagctaatctagaattgaacttttgaggtgatcagacaaaggatatccaactagatacttctggggtctttttgaagtttctgaggtcaatttagcattttatttgcaagcaggccttgatgacagctggcacctgtcacatctccaggaaacacaaaacaaattatttgcatgatctcccaagatagtttcttccttaggctaattttgaactttttccattaaacaacagaaagtttacttttctagcctttctatatagtgttcttgaaatgtgaaaaggggatagaaggctttatacagctgctgttcttcagaaaactcttgtgtacatgaggcccatgctctgttctgtgtgtgagcattgcaggggacaccttcattttagaaacactgtcctggccagattccagtcctccattattttatttacttcactcttcacattgctgtgatgaaatagctgacaagaaacattgctaaagctcaaatcacacataaaacttcacacacttatagtaggagtcttcaacaccccactctcaccactagataggaccgccagacagaaaattaacaaagaagcaagagaactaacagaagttatgacccaattgtgtttagcagatatctatagaacattccatccaaacacaaaagaatataccttcttctcatcgccacatggaaccttctctaaaatcgaccacatactctgcaatgtagcaaacctacacagatacaaaaaaattggaataaccccctgtatcttatcagaccaccatgctttaaagttagaattcaacaacaacacaaattgcagaaaccctacaaactcatggaaattgaataatgtgcaattacaccattcctgggtcaaggaagaaataaaaaaggaaattaaagacttcctagaatttaatgagaatgaagacacagcataccctaacttatgggacacagctaagaggaaagttcatagcactaagtgcccacatgaagaaactggagaattgtcacactagagaattagcagtgcaactgaaatctctagaacaaaaggaagcaaactctccctggaggagtagacaccaggaaataatcaaactgagggctgaaatcaataaagtagaaactaggaaaacactacaaagaatcaatgaaacaaagagttggttctttgagaaagtcaacaagataggcaaatcattatccaaattaaccaaaaggcagagagagagagagagagagagagagagagagagagagagagagagagagcatgctaattaacgtaatcagaaatgaaaagggggatataataacggacactgaggaaatccagagaatcaccaggccatactttgaatatctatactccacaaaatttgaaaatctaaaggaaatggacaattttccagggttttcgatttgattccattggtcaatctgtctatctttatgccaataccaagctgttttcaggatatggctctataatagagcttcaagtcagggatggtgatgcctcccaaagtttctttattgttcaaggttgttttggctatcctggattttttgtttttccatatgaatttgagtactgttcttgcaaggtctttgaagaattgtgttgggattttgatgggaattgcatcaaatctatagtttgcttttggcaagattgcccttcttcgagagactatgcagtcttctcttggggtcctccttgttttctagctcctctggcagtgtgaattgtagacaggtaattctttgctctatgtctaaaaatcaaaaatgagtgagtacatagaatgtttatctttttgtgattcggttacctcactcaggatggtttcttctagttccgtccatttgcctgggaatttcaagattccattgcttttttccactgagtagtactccattgtgtaaatgtactacattttctctatccattcttcagttgaagggcatttaggctgcttccaggttctggctattacaaataatgctgctacgaacatagttgaacatatgtccttattgtatgagtgtgcgttctttgggtatatgcccaagagaggaattgctggatcttgtggtagactgattcccattttcctgagaaacctccatactgatttccaaagtggttgtacaagtttgcactcccaccagcaatggaggagtgttcctttttctccgaatcctctccagcatagattgtcattggtgttattgagtttagccattctgacaggagtaagatggtgttggcataactggattcagacatgtagaagattgcagatagatccatatctatcaccatgcacaaaacttaagtccaaatggatcaaagacctcaacataaattcagtcacactgaacctcctagaagagaaggtaggtggtaccctagaacaaattggtacaggagaccgatttctgaacataacacgagtagcacaaactttgagatcgacacttgagaaagtactcaacatccttagccatcagggaaatgcagctccaaaccactctgagataccatcttactcctatcagaatggctaaaatcaagataaacatggtatgtactcactcatatatgatttttagacatagagcaaaggattgccagtctacaatccacactgccagaggagctaggaaacaaggaggaccccaagagaagattgcattgtccctcgaagaaggggagggggacaagaacccttgaacaaagtgggagcacggggcaggggtggagaggaaggaggtgggaagggaagaagtggggaggagaacaagaggactgagacaggggaggaatagaggagggtaaaaaaggagatgccttgatagagggagacattacaggtatggagagaggtctggcacaggggaaatgttagaggatccacagggatgaccccaactaagaatccaagcagtggtggagaaaatgccattgattcccttcccctatagtgagattgatgtctaccttggttaccattcctagagccttcatccagtagtgttcgaagcagaaacaggcacccacagctaagcactgaaccatacccctggaatccaattgtggagagggagaatggatgagcaaaggagccaagacagtgctgcagaaacccgcagaaatagttgacctgacctagtgagagcatggagattctagtcataaagctggggaaacagcattggactgagccaagccctctgaatgtgggagccagctaggaggccaagacagtctatgggacctctaacagtggtgccagtctttaatcctagagcacaaatggacttggggagcacattccctatggagggatactattgcagcccagatacagcaaggagggcctaggccctcccccaaatgatacataccacagactttgaaggtccctggtggagggcctcactatccgtggggaggagttgggggatgggttgggggtgttggtgggaaacatgggaggatgggagggtgagggaatgggggggatggacatgtaaatatgagtagtaattaaagaatttaaataaaaatataaaaaagaggaagaaaattaaatcacctgtccaaatttacagtaaccaatagtaatcaagatactgacaaaaggctagatacaaggatcaatggacccacacaaatacgagctattggtttgtgagtcaatggtgcaggctggagtgagtgggcactggtatgcaaaagttaaatgagcctcaacttttaccccacattctgaacaaacatgaacacaaagtggattataaatctaaatgtcaaatgtacagctactaaatgttcagagaaaaatcatttctatttgagctgctgagagatcctagaaacagagtcagaagtgtgagacatgaaagacaacacccatacattagaccacaggaagcatctttccgaagacaccatttaaaaaatggaaaagcaggctgagagatggtatttacaaaccatatacctgataatggacttatatctgaaataaataaagaacacttaacactttaccaggaaacaaagaacccaattaaaaactgtcaggtgatttgcatacatagtttaccaatgaagataaatggctagccaataagcacatgaaaatagctagccaataagtacactaagatatgcttaacatcattggtccctggaacactgcaaactaagaccacaacaaggtatttctatacatcagttgggatgacatagaataacagaacaatgtcaataccacgagtcactgacactctcagatactgctgatggcaatgtaaagttggcacaactgccacggaaagctctggcaattttctatacatttatttacaatggccatagggtctacaaattcaatgtagttaatcagaaaattgaaatgtatgtccaagcagaaacctatttgccagcattcgtcacaacttgatttaaagttgccacaaatgggaaacatcccaaatgcccttcagctgtgtgaaatggaccatcaaaatgcagcacatacctacaaaaggacaccattcaataacaaaaagaaactattgatataggcagcaacatggctgaacctctaatgcattgcactgagagaaagaagccagataacaaagactatctacagtaaatgttatacacatgtgtagaaagtcacagtaaattcaataagcaatataatgcacatatattgataataaaagaatatgtaattacataaagagcgtctaatcctattttgattgtgggggtcatcctgtgactgtatttgtcaaaatacacagactttttagtgacagagaaaatttcactctatgtaaacttgaatacttttaatatgaagatgtatctgtcatcatcccgttaaacttttatagatggtatatatctacagagaatacataaggaaagagttaataatggctcatggaatcagaatgagtcaggtttctctacagtcttaaagagatacccttgacaaattgaaataaatgcaatgcccatgaatgggggacaaattaataaattatagaacgttcagggaaaaatatagtcacttaaaaattatggctacttccatttgctggcttggaatctacaaagagtgcatactgtctgaatgcttaaaaagatttcttttaccaatccgtagccatttatttttatgaagctcagagcagaaacaataacaccatgagtagtgttttggggaggagtatgtttaggctgctgcaggcaagttcctggggagctggcgaacaatctgggggagtttccaaaaagtgttcagttgtgtcaagtttgaattagcttcatgtggttttcagtgcctttggtatattttgcaacagaatgggttaaagaagagctattaaagcaatttatgtaagaaagtgagcatcagccaggcatggtggcacatgcatttaatcccagcactcaggaggcagaggcaggtggatttttgtgaattcaaggccagcctggtctacagagtgagttcgagggcagccagggctgttacacagagaaaccctgtctcaaaacaacagcaacaaaagcaaacatctgagaagccacctcttatccaagaacttgaacatgacacatgacatgtgacatgtgtgccgcctccagaagcaactgatactgaattgtatgtgtcacaatctcttgctttatttcagtttgaccttatacatttaaggatgcttgagcaacagacttctgaaaaacacgttgtgctgaatatcatctttcagggcatggctttttactcagtgttacaccagattcacagatgcagtaacatgtttgtggttaatttactttcatgtggtgatatcttgcttgtacagataaagcctgtctgaaggtcagagaatggagtttgccgctagctaagcatagaggtctggaggtctgtacagacagacaggagggagacgacatgtagctactgggaagataggacatcaggcattctccagtaagccaaggccacatggaaatacttagattaatagaaatgggttaataattaagagagagctagccaataagaagcctgagccgttggccaaacagtttataattaatataggccgccatgtgtttatttgggactgaagggcaggaaagaaactcagtctgcactttcacacttataatactctatcctggtaacagagcaaagattctctaactatatcagaatattagaggtgtcactactcatctctaatgactaaatgttgcaataagcattggttttaggatctaaagttagaaatgtgtgcctggggtaatgaggaatcacagtgatgtaacttgtgtataggaattcctttttcagtgatgaatgcagatctagtatggtgcacaaagcagttaaagaaatgggatcttcattctgaacactgtgatagccagggcattctctcagacaatgaatgttgtagcccaactgccctcctgttcctcttaaagctttgacatattctttttttttttaatttaaattagaaacaagcttcttttacatgtcaatctcagttccctctccctcccctcctcccctgccccccaccgaccccccatcccaactcctttctgctccccagggagggtgaggccttccttgggggatcttcaaagtctgtcatatcatttggagcagggcctaggccctccccagtgtgtctaggctgagagagtatctctctatgaggagagggctcccaaattcatttgtgtactaggggtaaacactgatccactaccagtggccccatagattgtccagacctccaaactgacctcctccttcagggggtctggaacagtcctatgctggtttcccagctatcagtctggggaccatgagcaaccccttgttcaggtcagctgcttctgtgggtttctctagcttggtcttaacccctttgctcatcactccttcctctctgcaactggattccagagtccagctcagtgtttagctgtgggtgtctgtgtctgcttccatcagctactggatgaaggccctagaatggcatataaactagtcatcattctcattatctgagatggggttttaaggtaacctctgtactattgcttagattgttagttggggttgaccttgtagatctctggacatttccctagtgccagatttctctttaaacctataatggctccctctatgatggtatctcttttcttgctctcctctattccttccctgactagatcttcctgcccactcctgtcctcctctcccctccccttctctttcttctaactccctctcccctcctgttttcacatattcttaaaatgctattttttattaaacatataatacccaaatgcacaattcttagaaagaaaagcctaaacaaagaaacaaacatggatactgaagttttcctttttatccctaacccaggctttttccttcactcacacaatcaccattcctcagttttgttttctaggcgctcccaccatcagcttagtttgaaatcaaaatactttaattagaaagacaaaaaatgataaagttaaaaaacacacacacgaagaagaaggcattctgatttaacactcatttgaattaaaattatcacaaagaaagagcagaaaaaagaatttcaaatttatggaaagagcaaaatgtgctggtttggttttctatttattatttcatcaaataactcatcacacattttttggtttgtgaaatgctcagagtaagcattaaacacgtatccattttcaaacttatttgtgtactaggggtaataattaataataataataataataataataattaaataataatagtaatcgcccccagttagacgatttatagattgtctaccgttacatcacactgttagcaccaagctaaccgggcagaaaggacaccagtgtgtgcaaatccttcatatgctacaagtaactatctcatccagggcacaataaaaaatgtccccgactctcagtttctctacctgccaaacgaccgttgtaaagattgaatgagatatgtaaattgtacaacattcagcacatataagccctcttgtgaatataaacatacctgcttctctgcattcttcctgctcctttaatacctaactcagctcataacgattgtaattgccctggatggaactagaaaaaaaatcatcctgagtgaggtaacccagacccagaaagacaaacatggtgtgtactctttcgtaagtggatattagttgtaaagaaaaagataactatgctacaatccacagacccagagagactgggtaacaaggaggcgggggtggggggcgagggggggcacatggatctccctgggaaggggaaatagaagagatcttttgggtggactgggagcaggtggggggtgggagctggggcctggatagagtaggagagtactgaaagatgactggaaatggggggagcagcatttcagggccatatagaaacctgatacaagggacactccatgaatctacaagaatgaccctagctaagactcctggcaatagtggatacatagactaacctggccatctcccatggccagattggtcactaccccaattgtcgtcagagagcattaattcagtaactggtggaaacagatgcagagactcacagccaaacgttaggccaagctcagggaatcctgctgaagagacggaggaagaactgtaggaaccagaggggtcaaggacatcacaagaaaatccacagaaacaactaacctggctcataggatctcacagagtctgaaccaacaaccagggagcctgcatgggactggcctaggccctctacatatatgtgacagttgtgtagcctggtctacttgtgggactcctaacaatgggaataggggttgtccctaacgctttgtctgactcttgagatcctattcctcatgctggattccccggccttaacacaaagggaggagtttagtctcactgcaccttgatatgccatgctttgttggcacccatgcgaggcctgccattttctgagaaacagagtagtggattgagggggcctgagggtgggcagaagggatgttaggggagggaataggagaaggggaggaaggggaaacttcagttgggctgtaaaataaataaaataaaataaatttcaaaaaacaaatgaaataaaaagaaaagaaatgaaaaagcacaggcaaacaaacagcaaaaaacaaaaaacaaaacaaaaataacctgccacccctcatccctgtttccctaaccccttcctttcctaagagaaaacagaagaaaaccagccaagcaccatccttggtggctttatagctactaatctatagaggctgcacactcccccagggttctcctgaatgcagaatcccgttagggcacgggaactccagcttcagacccttcttttgcccattggtccctttatggctttatgggaacaaaaggtctagtccaatcagggcaaaatcattacatgcttctttaactagcactggggtagagggggacaataaagaggaaaaatagtagtctctttttaaagaagaatgtgccaaatatgtgtcctagtgccaggtcagattaagaggcccacagggaaagaaggagcatggctgcaagataacctggacaggatgagacaaggagaccactcctcaaaaggttatctggtgccaaaggatcactttggccatgattcctctcaaggcttcttccattgtggaacatccagtcctctagccctacgcctgtctattttcttaactcccagtgttctcttgaaagtgtactgccgccctgatgatacacaccagtgatctgaaataccttccccagggaaacaattctgaaactgctttctccctgctcaaccacatcctccactagatgtcccatcttcaagttctaaagcagagttttcagattcagttttcaatggggctttacggagactctgccttttcgttccagtccacaccaagacattaaatgaccagtggctaccgccattgcttgctaaaagaattcacatgagtttgccctggtcactgtccctgatagaggggaagcagctgcttagaaccttaacttaaatggaactgaaccactgctctcttacatccactcagacgtgccattggatgcaaacattggatgatggagacaggtggagtaatattctgtaagatggggccagccacctgggaacctttcttctctgttacttgaaataaccaggtaaccacactctctctcaaaaaatcccacagtcggaggagcaaactcatttccagctttggctagggggccatcgcctgcttggtgctcccaggcccctcccactctccgttcttacctgctatatgatgaaggtgcaagccgaggctcaacatcagcggcaggaagatcatggtctgtgtcgatctgaaatggacaatgagagagtctcagggcttggtgagatttctcagtctctgctggtttaactactcccaagagcatggtaatgacccagatacaaatcttgtgggagacacaggtgacagcgaaggcaagaggagaagtaagcagtaggtgccttttctgcagaagagggcatgcacagtaaggaggaagaaggcactctttctgaattcaaatgagatgctcttcttccttctggggaggccttgtctggagaaggggctggacctcctcagtcacccacatcatttcacttctaaagttgaatcagtatcaaaatcttgaacaccagccttgtttacaaattaaataagtacaccatcttctctagctggaccagaacttggagagaaaaccctggagaacagatcagcttgggagatcagattcctaattggttgagcaggaaaacaccaagtcttgagtgctgttacccatcatgcctgttgtgtaaattgcctctcctttttgttgttgttgttgtttggtggggtttttgtatgtttgatttttatatcccatttccctctctctcccatccttccactccccataccatcttcccatcccatcccttctcccctgactcctcagaaagggtgaggccccccatggggatcataaaagtctatcacatcatttggggcagaactaaggccatcccccctgtatctagggtgagcaagatatctctccatagggaatgggctccaaaaatgccacttcatgcattatggataaatactggttccattgccagcagccacatagattgccccctccccccccacttacacccacactcagggggtctagtttggtcttatgcaggttccccagctgtcagtctggagtctgtgagctcccacttgctcatgtcagctgtttctgtgggttttcccagcatggtcttgacctctttgttcatcattcctccctctctacaactggattccaggagtttggctcagtgcttagctgtggacctctgctcaaaagcaatctatagattcaatgcaatccccatcaaaatcctggcacaattcttcacagaccttgaaagaaaaatactaaactccatatggaaaagcaaaaaacccaggatagccaaaaaatcctgtgcaataaaggaacttcaggatgcatcaccatccctgacttcaaactctgatatagagctatagtaataaaaacagcttggtattggcacaaaaacagacaggtagaccaatggaatcaaattgaagactctgatattaatccacacacctatgaacacctgatttttgacaaagaagctaaaattatacaatggaaaaaagaaagcatcttcaacaaatggttctggctaactggatgatgacatgtagaagactgcggatagatccatatctatcaccatgcatgaaacttaaatccaaatggatcaaagacctcaacataaatccagccacaatgaacctcttagaagagaaagtgggaagtacccttgaatgaactggcacaggagtctgcttcctgaacataacaccagtagcacagacactgagacccaaaattaataaatgggaccttctgaagctgagaagcttctgtaaggcaaaggacacagtcaacaagacaaaacggcaacccacagaatgggaaaagatgttcaccaaccccacatttggtagagggccgatttccaaaatatacaaagaactcaaagacatcaaaacaccaaataatccaattaaaaatgaggtacagatctaaatagagaattctcaatagaggaatcttaaatggctgaaaggcacttaagaaattgctcaacatccttagccatcaggaaatgtaacttgcctcttagtgaattttctaattactatttttaattattttttggaacagggtctcctattgtccagactgactctacctatgtagccgagactggctttgaactcctgtttcttctgcttcttccctctgagtacacacttccctctgagttcccactgtgcctgccctactttttatttatttgaacacattaaatggcgatgatttattacttattataaattatgcctcagagaagctggttttaagatttatatgctgaagatatattcatgttgtaaaaactttattaaccactaattgtataaacaatgaattccattgtgacttttcacacatgaactttaattatatttactcccattaccctatatgcccccatctccttatggcccctttcctcattagcagttctcctactttcacatattttttcctacaaacggcattgaattcttctttaaggctgaataatgttctattgtatacatatgcaatatattttttatccattcatccatcagtgggcacctggaccaatgtcataacttggctgctatgaatggtacagcaataagcatggataccacgtatttaggtggatgacttagatttcattgggttctcaggaggggaacagatggaccatatgatggtaccagctttagtttttttgaggaatatccatcctaatttccatgtggctgtactaattttcattcctattaacagtgtgcaagggttcattttgcctgcatcttttctagcacctggtgtgttttgctttttctttgatgatagccattcttccagggggtggggaggaaactcagtgttttctgagagctctagacaaagcaggtagagctctggggtctagtggggatggtaggtatcatggatcctgctccaactcagcctagtttcacctcctgtttcctttctgatttcaggttttctgcatccacagaatactcatgtttgaacacagatgggatggcacactgctgtcagttctcccttgaaaggaaccttctccagggaaggctgtacatgtaagtcctggggaagcaaagctggtcagagaatacagtaagctggtggagggattctctttgagccctagtaatgtcatttgcatttttagaagaggatgttgctttggttagagaattgcctactatcggaaggatgagttagttggcaatgcagactaaggacagtgtgatagcttgcaatagggtgctagggctagaagagggaagtgatctgttgagggttttattttctatgtgttccttaaatttgttttttttaaatgtttaatcgctttattagaattattaaagttaacacacaaagaaagctgtataaacctaatacagattctaaaaagtagaatattaattcagtgagttggttcacatatacatagagttgtgttaccagcaccagtatttaattttgcaacattgtaattactactaaaagttagagaaatatccatttcctcttcattttcccagaatccctagcagttaccagtctgctttgtgtcttggtcaactacttgtgctgaacatttcacgtaaatgacatcaagtagctcttgaccttttgtggctagcctcttgctatgagcatgtcaagattcatctgttgtgcatcacatcaatactttctctcttcataatgggaagttattctgttgtataatgagccacatttgtttatcacttgctatttcttgtgagaacaaaatatgttctgttcatatctgggtctgtaacctgttttgagttaatttttgtggataactaaggtttttttgcacatgtttcaataaaatatattttaaaaaacaaaactatactttttctgtagaactgtcttggcattctggatgatcgatgtgggaacgtattgctggacttttcgtctattttgctcagctctgtgtctgttccacgcccctatcacacagtgctaattactgtagctttggggtaagtttgaaatcaggaagtgagacctacaactttgttccttctcaagtcctctctctccgtcactcagcccttcctacttctttcctcctctcccttgaacttctgtatgaattttcgtatagacttgtctattcttcacaaacggatcggactttgtgctttggtaagaattgccttgaccccgcagttccatccaaggggaatctgatcatctcaacattaagacctccaagccctgaaagaaacctacctgtctggttgcttttccctttttttcctttaaaaacattatctgttgttattattattattggtgatatgggcgagtgggtacatgtgctctgatgtgcacatggaagccaactttatgaatttggttctctccttctacctttctgtgaggattgggaatggcacttaggtctccaagcttgcttaacaagcacctatactcactgagtgatctcaccatcccaagcttttaaaactttgtattggcacatttaaatgttacaagttctaaaactttttactggcatatttaaacgttacactttctaataattacaataatttgaacaaaaaagatggccctctgattaaactgcatgttgcagcctgcaggacaccatggaccatctcagattttattctagatctcaccacctcccacccagcttcctcccctccccatcaggaagttctttcccctttccctttcctgccagccagacctgcagatggcaaacagaagacttcgttacaagttgttatggattcggtgatgtgtcaaagagagcccagtcatttaaacttggtccaacttcttcacattacaaagttaaacagtgtaaagaagtaaaattggactgcaacattcatggagtacttggtgcatgtggctggtgcttgtctctccatctgcctgctcctgtctgtctgtctgctcctttcccttgaaggaagagattctcccacacatttctgggttcttcagtttccatttactgagtttcaggaaggcagccacatcgggtatttcagacaagtgtgaggagaaaatggagtaagagtgtgtgagtcactgactgggccattttctatattttgaaagaaaacctatagggaattgctgactgtatagataagtagttacaaaaacacagcaaagctcctgggcttggggatggaggcattagggtagcagacagccagcaacagccatcagatctgaggtgcctgccagagttccaagtgaagctgctcggaggtggaagggcagacagtcccaagttggaggttatgataagaccttgtgtaataatgacataggccacagcctgcatgacgtcagccctgagagatgggaaattcaaagtatgcagcaatggacctggggtatttcagtatgtctgcacccctgtgaggagaggcaccagcaaagatgaggcaggcgaagggcagaagaccagacgatggcacttgttaactatagattccactctgggtattctgatctttggtagattcaaagcatgctgatgctaaacagactaccctccccaaatcagtcagttataagaggtggcatcgattggaccaggaactcttgtttaaatgtaaaccaggcaactcaagagtctttgtgatccatggcctgctttattggggaccttgacattcatgttcactatgtcatactcctcacaaccaaacactatgaaactagtgacaagtcctcactgaaagcaagcagaattgtgttaattcatcctaaatttgcttattctgcctcacttctttctcctggtgaattagtaatgcagacatctcccttctgcttcctggataaccccaatgtttccccatgtgggaccctatggcacaaggcttttttttttttcctttgagatttctaagtatatcagactatcttctcaatgacaaaatgaacaaacacttgacataccaggtattcattctttaaataacaaagtccttaggttgttttcaggagatgtcttcagaatccacttgaggggggatgaaactggtatttctagaatggacagtcttggaagaagccagaccacctggccaagacattgtgttaacaaaagctcagaaaggcccatcagaccctgttgacagggttggggtgaggtgggcggtgtgagctggtgatgggggaagtatttctgtgtatgtttatcttattgattgttgaataaagttctgtttggccaatgaggcagcaagttagacgggattaggagtcaaagaggattctgggaaatgtagtagagaagtggtgatccaggcaggaagtgacaaagcaaggagactcatatttaaggaaggagaagtaggaagtggcccctttttcccctcggcgcctcctccatcggcgccatgtgagccaccggcaagagagggtgccagtggaaggcatcctctataagataagtcttataaaatatatagatttatgataattaagactgagctaacagatgagaatcctagtcattcattggccaagcagcatttgtatctaatataagtctgtgtattattttgtccatccacgtggcgggcagaacttgggcggctggcagagatcgcccatgtggccatagggcttgggcagctttggcggaaagatttatcgtaacaagctggctcaaaaatgtgagcatgggagagctgcccccatcctccccatcacctgtatcaggtgggagagctggccctgtaccttgccttggcatcacagtacagttgaccctgtgagctggcctgaagttgtgagaatggaagagatggccccactacttgctggtcatgtgatagcatgaatgagagagagagaggctccccatgcacacaccctttacccctcgacacctgtggcaggtgagagatatggccccagggtcttgagagtgggagagcaggccctttaccttgcctgggcagcacagtagagctggtctcagggacatgaaagcaggagagctggccttgctcttcaccagccacaacactctggagagtgggccccacaccctgtctgggtaacacagtagagctaactggtgggagtgggggtagaggtggagggcaggggaacaggccccacttcttgcttcctgctgtgttgggtgagccagcaggggtagtgctggagagctctccctggtggtgaggatgagggagaactggcaggctgaccaacccagctaccacccagttccagaaccatggctataagttggcccacctcaacatccaccccttctataaactgccagagcatgtaaaagggccagtcctatagatccaaaactacagggcctccatgacacaggtcaacaacaggacagccaggagaagacccagtgagaggccagtattgtggtgtagcaggaaccaaagtccttgagccagaccaatgactcattacaacaaacacttgtaagtaacaatgtatgagtccgcagtcactgtgtccttacctttatttcaggaaaggccacatcacataggtaatgctctgggcgtactacttgtgatgtaccttagctgaacccaacaatggccatcctcttatcaaaatgcaagcatcacttaaaaagttactgccttcatgcatggcagcaggcctggcacttgccagcattcttatttttaaaacatgaaaggatgacatacagcagagttctcacttctggtccagcttccatttcgtcaatagccaatcaatggaacttttctggaacactgtctccctggaaagctgaggaacaggctattctaaaggcactttccagcctgcaagctcctgtcctattaattttgcttctagggaaaatgtgacccgtgccatgaataagaacacagactctaaaaccagacacatatgcaataaaattacaaattattagcttctaacactttggacaacttataaaagcttttcactttctttccaataataataataataataataataataataataataataataaccatctcatgccagaatcttattctcctctaatcctctaacttctacatccgccaggcatcttagtttagccctctcctttctgctatccattggcatccgcttaactcagactctcatcacttctgctgctgccctaagataacttcctcactgcttgttccccctttgtgccgtggcttcctctctaccagtcttgatgagactggaatcatttttcactctttttctcccttttgacttctgactcatcaactcatcctataagtctctctagtcacaaacactcagaacctaatcatttgtcaccacccccagagattccatatcagtgggggtcattgtcatctcttgtgatgatttctgcaattgataataaaacactaagatcctaatcccaccatctgacatttgatgttcaattcagcagccagagtgattcttttaaaacatacgtgctattgtttatggagtcaagtttttctaggaacactttttaattcctttcctgccctggcctcttttgcctcattagtcacaaaataataacccatgccctttccatgaacaagaacactcaggttggttatgaaaattctaatctcattttactttgtattttgttttactctacctttgtttatgagtttttaatggaatcacacagtcttgttaaatgccttatattgtactacattcaacacaaacatttcctaacttactttatgtagttccctgtatcttgagtgtattgtaaaactatcatgtagctcattactggtatgtcaagtgattatacgttagtcttccctgctaaaatgtaagccttttgaatttatttagggtcttggaattttgttgaatagacaataaattgctactcagaagcatgatcattccctcgggagcctggctcttagacggactctttctcttttagataaacaaaactttaggaagaatttcctttcagttaaggccacaatgggatgaagtagtaacaggcagacaaccatcatcctaggacttgcttaagataagggcccacattgaaacaagagtttccattggtggaaggtgcttgcaaggttgtcaacacaggcattttaagaccctctcttatcaacttgtctaaatctctagtcagtgcaaataagacctttgtcttctgagttcgtgtgagaaccatattttctgaatgaataggtcttcagagcctttatacttagggaagcaaaagtcaagtacaataaagtgaaggaagcatcgattcttttacagccagacaagcaaggtctggagagtttagaggatataaggaatgaatggagagtttagaggatgtatgggatgaatggagagtctggaggatgtatggaatgatcaaagacctcaacttaaatccagtcacaccaaacctcttagaagagaaggaaagtggtaccctcagatgaactggtacaggagactgcttcctgaacataacaccagtagtacagacattgaaatcgacaattaataaatgggacctcctgaaactgagaagctgctgtaaggcaaaggatgcagtcaacaagacaaaacggcagcccacagaatgggaaaagatattcaccaaccccacatctaacagaggcctaatttccaaaatatacaatgaacttaagaagctagtctccaaaacaccaaataatccaattaaaaagcgaggtccagaactaaatagagaattctcaatagaggaatataaaatggctgaaaaacacataagaaagtgctcatcattcttagccatcagagaaatgcaaatcaaaacaactctgagataccatcttgctcctgtcagaatgactaaaataaaaaacaccaatgacagtttatgctggagaggatgtggagaaaaaggaactctcctccactgctggtgggagtgccaactcatacagccactttggaaatcagtatggcagttcttcaggaaaatgggaatcagtctattataagatccagcaattccactcttaggcatatacccaaaagaaacacattcatacaacaaggacatctgttcaaccatgttcatagcagcattatttgtaatagccagaacatggaagcaacctagatgcctctgaactgaaggatggatagagaaaatgtggtacatttacacaatggagtacttctcagtgggggaaaaaaaatggaatcttgaaattcccaggcaaatggatggaactagaaaaaaccatcctcgcctggcggtggtggcacatgcctttaatctcagcacttgggaggcagaggcaggtggatctctgtgagttcaagaccagcctggtctacaagagccagttccaggacagtctccaaagccacagaaaaaccctgtctggaaaaaaccaaacaaacaaaacaaaagaaagaaagaaagaaagaaagaaagaaagaaagaaagaaagaaaggaagggagaaagaaaggaagaaaaagaaataatcctgagtgaggcatctcagccacaaaaagacaaacatggtatgtactcactcatacatggattttagacctagagcaaaggagtaccagactacaatccacattgccagagaagctaggaagaaaggagaaccctaaaagacacatacatggttccccagagaaggggaaagggaaaagatctcctgagcaaattgggagcatggggggaggggagagggaggagaaagagaaggggagaggaggacaagaaagagcaggaagatggagtcaggggaagaatagaggagagcaagaaaagagttaccataatagagggagccttataggtttagagagaaatctggcactagggaaatgtccaaagatctacaaggttgaccccaactaaaaatctaagcaataggggagagctaccttaaaagcccttctctgataatgagattgataactaccttatatgccatcctagagtcttcatccagtaactgatggaggcagaagcagacacccacagctaaacactgagctgaactctggaatccttgcagagaaggaggagtgatgagcaaaggggtcaagaccaggctggagaaacccacaaaaacatttgacctggacaaggggttgctcatggacccccccccccagactgatagcagggaaaccagcataggattgttccagaccgcctgaaggaggaagtcagtttggaagtctggttaatctatggggcctctagtagtggatcagtatttatctttagtacaccaatggactttgggagcccaatccacttagagggatactctctcagcctagccacacaggggagggactaggctctgctccaaatggtataacagactttgaagatccccatggaaggcctcatctccctggggagcagaaaggggatgggatagggagtcagtgggggggggcaggggaggaggggagggaattgggattgacatgaaaaagaagcttgtttctaatttaaatttaaaaaagaaaaaaattaactcatcatttacagggcatccactccttcagctgcatgaacacagtgatgacatggataaatgaaatgtgcaggtgaccagtccatctttgcagtctcctttctgaaattcatttgtgttttgtaagtcagtaccctaccatctatctattcttgatgtctgtcctttttttttttttttaaatgtactgtgatggattctacaaatcagtgggttcactatcaactggtcaaacctcaggaaatgaacagtaatgcttgtgggtacttggatgacatgttgtaaatgataaatcactctttgagtttaccgccattatgtcttctgaggtgacaggcaatcttgggcttagaaattgtatgactttacatatgcccatttatttcatcaactcactaagggttcatctagtagaagtctctctattttattacttacagggctacctactttgaggtacctcccctgtacctcaaagtacatatttgctttctaagtacatatttgcaaagtagttacacctcaagtgtattctttatctgtcttattttcagtagttcgtatttaactttctcccaagtatagttattaataaatcactcagttttcttcaggtggagttttatgtagcccaggctggccttgaacatctgatcttccttctttactagtggaatgctgggattataggcatgagccaataatacacctggctccctagtagaatttttagctccctttctcgttatttctacacaagaagtacttagatcaatttcttcagttgcattaggaagtcatatttttttccagagaaatcaagaaaaagttttaagaggctcaaaaatcagttgcagtttcattttttgggtgttgaatgttttgtttcttgccatttctgtcatctgaccaaattaacaatgaaagaaattaactttgtcatgttatagaaatgcagaaaagctttcattctttattttattcataatctttactgagtgccaagctcttattacagaacatacggcacagccaacaagcttgagaaagtctcctcaatctttgaacaacccaggcacagactggaaacatctcaagaatcctagattgttccttgctgtaataatgaccagcataactgatactggatgtcttggtcttagccaaaaggccaagagatgatcagatcatgtttgtgtatcatctcattattactaaaaattcccagttttttctggtttggtttcttacatactttaagtgtctgggacgcctagcatgcccaagacaacctagattaaagagacatctggactagaataatgtgtctgaattagctactgattctgagatcaagtatctaagaccaaaactgaagttagctatgtttgaaaataatttgaatgtggtgcctttcaacaaaagaaggcagaaggccctgggattctgtcactcctcattgtatcatatctaccgggactcaagtatttttgttaacagtcagtttccatagataataaggatcttagagccagtgcccagttgtcatggggatatgagtaactgtgtcatatttaaatcatctgtggcatcatagacaatttattctcattgttactcatctcaaaaagttcaagctgcatctcaatttttcattcaataaacactgagcttccccagtgtacacattggcttttgtgagtctttatattagaccatggagaatttgtagtaggattcacttaagaaaagacccttgcaagttaaaggcattataacatagttagaaggtcagaagccacactaactaggagctggtgtaaaaggaatggacacagagcaagctccatgtgaactgactacagagatggagactttctagggatggggtccttgaagtggtttttaatgctctgggaaatttggcctgaatgttctttgggtaggcacctgggaagtacagaaactaaacctcagaaatgcaaatgcatgggaaagctgagggaacacaaaagactaaagtggtttctgcaattcacactgaacaattatatgcttcttgccaggcagaggtgataatgaggttgtagtgcccaccatccaaaaataggtaaaatgtcaaaagagtggggaaatgattaaattgtgtgtgtgtgtgtgtgtgtgtgtgtgtgtgtgtgtgtgtgtgtgtgtgtgtatgtgcactcgcgcatgcagaactgaaggaggattggccactcagagggtcactgttcttcttctatatgtttgatcagaaagtccttgtttagagtcagaaaaggtaagcaagagaaaggagaaactgtaagaccattgacagaactgttgacagaacaattggcaactgatcaaccatataggtgagaaaaagagaagcaacaaggatgactggagtcttaagaccaaaacattttagggctagacaaagaagttatttccatcacggaaatgtcagctaatattggggactgaagaaagtaccttagtaaaagaacacattgcaaacttacaagatgccttgtaagctgatcaatcaaccctgaagcatagtaccccagtgcatggtatctcagcactatctggagatactcccacactctctcaccatgcacgaattcaccaccacagctctcctcttaggtatgtcaataaatagcaattactgcatttttaattttcctagttctcctctgattatcttatatgagaaaataagctacttagtaggctgcaatcatattttcttaaatttaacagtggttaatgcagagctgtggaaaccatttccaaaggatacatctataaaacattctgcatctaagattcagggaccactgcagaagagggggcagaaagagtataagagccagagggttagggtgtttgccgtgagattgtgtcctctagaaatgtcggaaactatgcccataaagattcagcaaacatggctgcctaaacaggagctgaataaggacaacgaaagacatggtaaagggggaaaacccatgaggcctcgaccctccacaatggactgcaagcagctaaggaatgctgacatgggaggtagagtcttccctggggatgggcacatcaattggttatccaataccaaatagctctgaaaatatacatatgggtaaattatacagactgagcaggctgcactcaggaacacacacacacacacacacacacacacacacacacacacacacacacacacatccttgtaacaataactaatgagaaaagaggccttggcttagagcaaggaggggtatataaaggattttgagaaaggaaaaacaagagggaatgatgtaattataatttcacatttacaaaaaactaagaaaaaaatttagattcgtggaatataatcatttaaattttttctgtccctaatagcagactcttaagcctcgctttataaacacaggtcagctgggggtattgacctctatccaaaagggtaatcacccacagatgtcagttgtagaaaatcagattctgaaattttttaaactgctaacacttcaaaacctctgagggaggcaatctcaagaatggtttctcaggctgctaagaccgcttggtggtaaaggtgcttgccttccaagcctgagctctgtccctaggataaaaaggtagaggtaggagacagcatggcgttggtggcctggctatctcctttaatcccagcactcgggaggcagaggcaggcggatctctgtgagtttgaggccagcctggtctacagagcgagtgccagaataggctccaaagctacacagagaaaccctgtctcgaaaaaccaaaaaaaaaaaaaaaaaaaaaaaaaagaaagaaagaaagaaagaaagaagagaaactgaggctacaagctgtcctctgaccttaacacacctattatgacatttcacaaccaaggcacagtatgcagaacaaccaaggcacagtatgcagaataaataaataaataaacccaaaacaagaatagttttctctccagtgaaacttttttttttttaatgcagaaagttctttaccacataaagagtttcaataagaataacaaacactgggagaagtgagagaaaccctgacttttgggagataggaagaaatttccctgtaagcacaatttcccagtcagaatgtgacaaaaagaaaagctgtattctcattgtcctcccccccaccacggcagactcacctacacaaaccaagatagtaagagacattctcaatgcactgtgccccccatactcacaacagccccagcacagccctgccagcagactcgaggaaaagcgtctcccagaggtcttccaattagattcccttgaagcaaatgacacccatgaccaaaactgtccgcaaagggaacagcaagtggattctccctagttgtaagacaggagggtgcaataaaagtatgcccacatttgagcttatgatatattcagcaagggaagaaaagacgcacgcagtcatgatccttgaagttctgttttcctgttaaaaagaagaaaaaaaaaagtggggttggggttgtaattcacccagaatggtttctgaggaactgcatactgcctgcaagcaagttttggttttgctttcagcactgttgctttgtctgtaggtcctctcaagtcaaatccctgtcagtcacccgggagctattgctcttgtcagctgtccttcagttgtgtccctggtccatatgtgatggggatccccgcagcaagctggcttccagactggccataccacacaagctctgcctcattgaatacggtggaagagccactgacgatgactccctacatcaacctcaggcttccacattcatgagcacaagcacatgtgcatccacataaaagtgtgcgcacacacatgcacacatgtgcgcacacacatgcacaggcacacacttagaaacagaaaaatacataaacgagaacacttcccagcttcttcatagcttcccaccagctagccacttagcaattctgggcatccgttgccatgtatagcatcatctcctctcttcatgcagcccttgtcccttgtgtatctccgtgtgtttcctgtttttataaaggcatcagccattggactagtgtccaccctgatccattataattttatctataaattcccgacttccaagtaaattctgaagttctaggtctagggtatgaccagtggtgatgtttgggaggacactaactcactacacgtctagatggtatgatgggggaactaactcactatagcatctagatgagtgtcacagggacactaacacactatactatccagaggggggtgactgggggcactaacttgctacagtgtctacatgggtatgactgggggtagtaacacactatagcacttctaacctaggaacacttggatccattccacacaagaaggaatggccaagatacagacagcaatggtttcttaggtgtatggctggatttgaactcaggcctgtgtggccccatcattctatgaagctcctcagggcaagattcaaacccagtaatgagaaggaaagctggagtaagtgcagatataggggcagttgccttcttcttgacccaggctggagatggggtgggggtggctgacagagatttaggtctgcagactcaggtggtcatgcatgggtttttttgctctctgctcttgaccccccccatgacctctgacctctggttttccttttgaaaatgcaggatcctttcatacttgtctatgtgctttttaaatgtttaaaaaattaattttaatctctcccttgagtaaggagggaagattacaaaaaggagtggttacctcaactacaaaacacaaagtgggggaccataataaggggatcctgtttgggaagctcacccctccctctaaggactgccgcccacttccagctccaagatgcactcacagagtggttctgggaatctatggaatcctcagctcatccacaggagtgatgaatgtgtaaaccaccttcccacctcccgagctcactccagtggccactcacccctcagtctcttctggatgggtctgaagcagccagtgagagcccaggtgtcttcacagtggagccaaagtaactcaagctggcatctcagcatgctggcctgctttgtctaaaaaaatatcaaagagggcagacactgaagtctccacagagcatggtgcggagcatggagttggttttacagtttgcagttgctttttcccgttacattatgttttctgcctgctatgaacatgaattactcttttaaacacatagaagtaacttttaaaacaaaggaataatagagagtactgttagattgctgaacaaaaccaagaaaacattttaagactttagcaaacatctcaagaacttagcaaacatctcttatgtttttaattatttaaaaaagaacacacaactgtgaaagctcttaacttagaaacacctgtaagctctttgcttcattcccaaaggtctctcacaggtggcggcggcggagcaggaggaggagcaggaggaggaggaggaggaggagcaggaggaggaggaggagaggagaggggagagagagagagagagagagagagagagagagagagagagagattgagagagagattaggattagacccttccaacattgtatgtatgcttggtaatggaaaaatgacaaatatggtcagaaaacaaaccactttaatatgcacgataatgttctcaccagtatacaaaacctagcacagtcttccattctgtacagagagaagctgaagagagattatattgtttatcaggctagtgcaggacaaagagaggatgtgtcacacccatttcgcccttccttccctaagacattttattctaaatgaactgtcatgaaaatgctgttcaatgtatggaaattgatgccacctaacaaacatgacagtgtgaaatgtttatgtcagctacccagaatgatgtctgtcatacagcaggggctcagtcaacgcagccacagcccctgctgatctgaaataacctattccaccctgcccactccaattagtctaagggaggatgcacatagcatgaggatgagaaagaaaaatggctttggagaaataaccaaagggcaagtgctggggaagccatgacctgtgaggagccagaccgactctagaattgtcttcccaactttcccaagccataaccaagattcacacttggtctttatctggaatgtggcagaagggaaaaaggctaacctttggagaatgggtagaaggacagtcataagcagctggggacagggagaagacgggcattcacacttgggaatctgtatgaaaactggcctcttctattacagcccaggaattggaggccagtcagtttttggatacacactggcttgggattccaccagatctctgctgatggaggcctgatcttgaggtgagggagagagaggcatagatcgaagaatctctgtccaagatagctgagatgttcatttcatgctcagagtctattttggcctcattcgctgacaagggctcctaacgtcaagggaggtgtattgtaagtggttgggttgttgccaggctctagtgaagtgccttcccgctccaatttcaccatacctgcacagtgaccagagaataactaaggtgatggctcctggctaaaaggcaagttactgaactcctaactgtcaaatttaagtcagactgcttcctccaaaaaggtgtctcaggagtaggggtcagaggtcaagtaggaagtaagggagaagagatggaacttgtctactggccttcaggaataataaaaaaaaatagaggaggggactcatgtgacagaagtttctaggagcctagaaaggacttgtgccttcctctttcccctcattcctgaacagacaggagaacactagacatactgccctgaagtatgacattgtacttactacaaagacttgctgcctgaagtttctgaagcagagaggttcaccaccctgcccatgcttgtaaagggagatgggtttgttcatagggatgaaggaaatgggaacacctttgctcccatgcctggaccaaaggagctacaaaaccccaatacctgcttcaacaatgcagaaaggaaggacatctgtggcataggaagacagggctctaaggccactaacagtggatggaatcaggctaagatggccatgtcgctcttctgctccaaggtgggaaagctagaagcttagcttgctttgggggtaagtgtgagttgaaaagatataggattgggactttaaatgggactgactctgtcagttcctcaaacatagcacagagttcccatatgacctagttagtattctactcatagcaatgtatacatgacaagagaagtgaaatctatacccacacacagtctacgccaatattcactgcatcattattcgtcattgacaaagtggaaacaacctaaatgcccagatggagtgctgaagcagagtgctccatacaatgaaatgtaattccgtcctcggaataaatgacacacggacattcggtgatatgatacagtatgaaatggatgcaatataatatacctttaaagcatgctatgacaaagaaactgggcactaatgacaaggccacgaattatataactccatagctatgaagcatccagagtagacaaactgacatagagacagagaacactgaatgactgcttaatacaggaaagcatcagtgggaactgctaaggggtgcatggtttcatttggggaatgaaaatgtttgcaattcaatagcagtattgtaatacgaaaaatattggggttcaaactgaagatcagggaagcaaagcagccaagctatcagagagctcttaacctctaacaggactgtggtgttcctattatcatcgtggttggagaaatgaatgcctcatactgtgaagaccctgttcctatctgttatacctctctagtgctgggattaaaggcgtgtgatcccaggtgctgagatcatctttgtgtgagctgtttctgtttaggactggatcaatcttgtgtacatctgggtggccttggactcagagatccatctacctcttaatcctgagtcctaggattaaaggtgtgtaccaccatctcctagcttctggctgctggcattaaagatatgttcctggtttctatgacttgtggctgactttgctttctgaatcctcaggcaagctttaataaatcataaacaatatactaccacacagtataggtcacactagtctgtgcataacagtaaaatccatttacatgggtgaactgtgttgtatgtgaaccatatcccgagtgctgataaaaaaaaaaaaaaagtgggactcagctgagttgtgacaagaagcctggtaatgatgaagtcaggttgggatatgatgaaggcctctccttaacaggttacgagaatttgaccgactgctagtgtcaactttaaaaataaaacatttcaatgaattgtgtcacctcaaattggtggttatagagtgagaaggaccaggaaacaacccctgtgcgcaccattttccttagtgtctctcataatgagaaagtctctctctctctctctctctctctctctctctctctctctctctccctccctccctccttccctctctctctctctccatctttctcctgccccctctctctctccatctccctctctccatccctccttcctcccctccccttcacctgactatttgggagactgaagctctaacagctggtcctcatcctaatccaacgacagtactggttgtgtttgcaggctcagtgttgtgtggatgccaatgtgtacttagtttttattcaagtccatcagagagagagagacagaagagcccccaacctcctgcaccacacctagccaggcctgagcttgtttgtaggaagagaaaggcttgaggactagaaacaatctggggactgaaggaccctcagagtcagccaatatccccagagctatgacatgttccgggggtcaaactgagatgggaatgtggttcctgctacctgggctcatatcccttagtctttagacctggaagtggataaagggttgggggtcaagcagaggagatgtttagatgttatgctcaggtgaatggaatcagctttctcacagtgactctcaggtttcagttcagcttaaaaaaaaaaaaaagaaaaagaagtgaaacgaacctctttaaatgaagtcaaaggtagtgaaagggacagctgactcatacctaagtgtcaagccggtggtggctccttacgtggttcaagtcagtggctcaccagaatccccttggggaacttggaatgcgcagaggtgcccgggtatcacccagacatcccgccacacactcgggagtctgcatttctggaaagttctcacgtgtttctggagcaactgatttggtgtatcggattcagagaactcatgggattgatgtccactgatggcaatcattgagtcagaggaaggaacggaaaatgaatctacaagatttcaagacgcagcttaagtctgccttcgctctacaacaagcacaggtggcaatctgttaactcagcaatggaggagcggggatgatgcttcagtggaaattgctctctcctggtgtaggaggcagagttcatggcaggcccgtttttcaaagctacgcaactgtagaggacgtggcactgtggaaaccagagtagatagctcccaacaaaagccagtcagtctcctggctgctcggccagactgctcagagccctggcccacgacataggactttgtgggttatagcttataatgtatacagaatttcttcacttgagtgtctagtataacgtaggacctactggtccctctggttgaagtgacgtgttaaaaatcagcagcttcttgatgtcggaactctgagccaggtatttggagaacagaaaatttaaaaaaacaacaagctcattcacaaacttcactttatctgcccttccacagttcaaggctccttggggtaacttccaattatttgctcaacagaggacgctctttcactcagtgttcttttccaaagaccggggctacagaggttcaggtgggtctgtgttagcctcgaggcgtgtgcccaagtgaacagactcatctctgggtggtgagggacacagaatgcttatctcccagtggactcttgagagtcctcaacctggagatcctggggtccgagtctctcagtgtaaagtcacctcagcttagatcccagaaccctggctaggggcagtgagggagtgggagaagggacagacacacacacacagagaagctgggatcgatcggttggggttctctaacctacatggccactagtgggaacctcagcatgctcctgcggtacagcacagggggaggggctggctagtctgggaggagatccctgtgagcctgcagtctgaggatgtaaacatgaggaggaagccgcagtcagttgctagtccttgtatacactgatcaattgtctataaacacccatactaggagtcccgtggaaagccttgcccatttcccgtgggccatttggttttggagtccttgactggctgtgcccatgttaaaacacacattcactcaggacttcacagggcttcctctgctccctacatcttggcctgaaacttggtgacagtaggggctgtataatgacctagaataaggtaaccatagcaactaatcaattctaaatggagtgcctaagaagatgccctcagctaataaaagaggaaacaaaactgggagaagctgaggaaacagggggttagctggaccctaagagcccccaggaacagcagtgtgaacccacagcctccatttctgccttctccccaccccacgcccctagctcctgcccagtgctctgtcccttccatgccccatgaagcagagcaggtgaactgatgctgcaagccaaagacacggagttgtgtctgtcgatttggtagcaggcctctgaccagatgggtctctatttcatccttcatcagccagagaaatgacttctctaagtgcccattccatcatcagtcaaatgaggatcataaaagacttgcttcctggggctgttgtacagataacatgagctggtcctggaaggtccccaggacaggtttggggggcaacatgaagtactatataaatgttagtcttagggggtaaccaacccagatcccatctctcaaatatgcccgatttagttcatttgcttaactcaaattttaaaatttaaagtttagttttttttctgggcacaaaatgacacaatgtatcaatgtaaaaatattttaagccgcaaaaaagtaaattataaagaagatagtaaatattccctaaggagtaaacctctacataattgttctctgattttttgttttgttttttgaggagcatagttcacggtgcctctctggacacaaccacagaaatgtacttctaaataagtaccattgtgttataactcacgttaatgaactaataacaaacatattatggacatcttttcctttgagactgacagggctttctttgtctgggaacaccatatttatttaagccacttcaagtcaggcttgcctttgacatggtgcccgagaaaacaattgcatttcaaaacactgcataaccggctctgaacccttgtctactttatctggacagacacctgtgggaaatggactagacaggtggtgagatgccactgataaagctgtggttgttgcagcatctcagggtgcaactgtgggaaagcatctaggctggcaaacagtttgtggatgggtgaatgtttagagactgttcctgcccaagggttttaaaagtgtccttaatagggtggacttcttcttttatttttgtttttaggccaagaggggagaaccaacttatcttgttgggcctccagtgccctacattttttttcttctgagtttctgcctttcctaggaagacaggttaggggattttaattggctggaaaatgtcatataacttttgagaaacctttgaaggttcagtgtctgcagtattttattccaaacaagtttgggatgaatttctccatcaccccaatccctccttattccctgggggagaactctgggcatctttagcaaatgaggccaggatattaggttacaaacaggatggtgactgcaagctgcattggcttctatggactgaagagcagaaatagataatatcaacaaggggaaacatggctgtgagatgacgtatcaaggcctgctcagcttgacctggctctttttgcaagtggaggaaggagattaaatgcctggaccttcaaaccaaaggtcaaaagtctcccctcttcctcccagaaaccaaaggccagcttgtacctgcccacttcatcctggcttccacctttttttccatccaccaccacagaggactaggcaggcacatcctatccccagtggccacttgcagcccttgctaaggagaaaagcagaaacataggctgagctttgccgagctgtaaacattgccagacagtcccaactgctttgcacatatccaccatttcacaacccaaagagagagacaccgtcatcagtcccactgtataagtagagaaactgatgcccagtcaacagactgttgatggttgcagaaggaatgagacagcatcatctggttctgggtatttttcactcatcattgcttctcttcattgttaggacagggctggctggtcataaagagacctgtgatgctctcttcaaccagccctcctaggaaaacagaacagcaactccagaagagctaatcttgagctcaaagtaaaacctcaagagtgatgaaaaacttcccagcatagtagtggatggtaatcccagccaacagcaggccaaggtctatctacagaaacaaaaaaaaacaaacaaacaagaataaacagcaacaaaagcatccaccatcctcaaaagaggctcaaacaggggccttgagtggagcccaccaagcctgggagaggaatgggggaaatgtgagtggcgagtggatttgtggtgctatctgacattccagtgctttgtctcagaaatgggattctaggaaggacatctttgctttctctcttgcctgggtcctttcctttttgcttcccgtttctgctgcctcctcttcacaggtgagctccttcacagccaacagacacagacacactaatttctcctgaggcacatgttctctgtatcacgtatacacagtttgtctgcacaaatttaattttctaggagtgtgataaagtaacctgattttactatgcattttaaaacacacgtccaagttcatattatgaccccagtactcaggaaaacacctgggccaaaggaggtaggttagagtcaggggcctttaagctgccccttggtatgatgtggtgagaatgaagagaagctatggcctctcttatgttatgctggcttgtgtttgtaatctcagtacttgggagaccgagacaggaagactgttgataattcaagcccagcctgcaatatatagggagttctaggccagcctcagctagcatgtaagatcttgtcttaaaaacagaagcaaactcgggaggcagaggcaggcagatctcagtgagtttgaggccagcctggtctccagagcgagtgccaggataggctccaaagctacacagagaaaccctgtctttgaaaaacaaaacaaaacaaaaaaacagaagcaatacgtcatttcacacgagtttacctgtataagacctacacctgtcaaaagtcactcttggtggatgagctactggcaattgttggctgctaacatggctgttggtagagtgttcacacccaaatggatgatgacctcacaccaggtctatatgggcagcactaaatggattcaggattaataataacaccaacaacattggagaggagtcacagtgggacatttaggggagttggagaggtgtagtggtggatagatatgatcaaaatatgtgtataaatgtataaaactcttattttaaagaaacagaatgaagaggcagaaaggtgagcaaaggatgaagtcagaaaaccatcatgcaatggacagggagaagactgacatcatttgaggggtgcctactctagaaagggggcatagtaccctttgcttatggatacaaaggattcattctctgaccgtgcccacactggtagccaacagcccctttctctcagtaagagagttttatttggcaagacatggtattttaacaacaacaacaacaacaagatgtttgctatctctttttgtgtgtgtgtttggggaggtggggttggagacagggtttctttgtgtctttgtgtaacagccctggctgtcctggaactcactgtgtagaccaggctggccccaaactcagagattcacctgcctctgactcccaagtgctggagttaaaggcgtgcgccaacactacctctttctgggtgtgtgtgtgcatgttgcacacacatgtgcatgtaattcccatttccagtaacctgaagttcaaaccagagcattctcagaattgtcttgacttttggggaagtagcttcctgaatcttacctatccacgctcaccccatgttggtgatgtcatagtcaaacttgaattttcccaaccctctccgcagaatttcccagtgtctccctttcacgaaatctaggtaagtatcaaataactgtttttcttcgctccatgatctactttcatccataatttgcggcaatttagactttatagaaccattttctttacagctccccttatctttacagcttaaatctttggatccacccacccagaaacatgaccatgtctttccaggctgtatcgtgaaatttttacttttggaacaaataaagaatccatgttctaggattcagaaaggacataaacaattacaagggtccatctcatctaaataggaacacagaccagaagtagggctagaggggagaaatacccagtctgaagcaagtctctctggggacacaccagaaggatgaactcagtgtcaggatccatgggctccccaaggttccctccctactgccagctttccccaagctatgactcccaacaccagctattgcctgcttccatggccacctgaaatgttgcttctgtagcagaaccaagctcatagtcctattgataatgcacctacataaaagccattaaacgtttccccttgcattaagagcagaaccgaaccgtattgtgtgtcttggggacctgcatggtgagctttagactcccaccttgcgtcctcactttcccctgaacttgatacactcaagtccactttgttactgctttggtgaatactgtacttctggggcttcattaggttatgaatagggagtccaaacaaatttacaagaagtccctggcctgcccattctatttaaagttgcctcccaactcagctacccagctctggttagtattttgtactgaagtggcggctctttttttctgtgatttatctgcacattcatgtctcacctagaatgtgagtccccagagagcaggagccttgttctttgatcccccggatttcccttcttcattcccagtatgtattggaaacctgacatctagtaaatgtcccatgttacttggctgaaagaatgaatctttttgttttttatttttttcagctccaagtttactgttgcttaaggaagaaagtcacaaaacaaagatggcagctgggtttcatttaaaagcaatcaattaaaacagctggaccacatagctggttcccggtaacagggctggaagtacacctaagagttcaactctaaatgtagtgatttcatggacttggttatcttatgccctttccttcaccagggctgtgaaagtggagcatgaagagaccaagaggattgctgctgtactcctatccagggaccatgccaccttgggtaagtgatagaggcttcggcaccctgccttgggagattgtgactgtagagccctaaatgaaggtgtcagcactgactctagggttctgatgattctactccagaaaggtgcatgaagaggtctccaagctctgtcacgtcaacatcatccgtgttggtgacctgctgggtttctcggttctcgataaaatcccaaagccacactgaattaaagaacctcacagtgccttcagaactcagctgctcccgaggtttctctggctctgccagccatccatccaggtaagcacggcacttgcttccaaagggacaggtcccttttccttgctcaaagtatttacatgccttttccccatcccctgtttgaaagcttcaatcaattcattcttttgattctgatcttctacccagtacacacttggaatgacaaactctgatatcacaggacactctggacaagactttatgatcgggttttcaaactgcttggcgcatctccattggcggatgcgggacagaccgtaggtgtggctgcagctggagagaatgccaaacctctcaggtgcagatgcctgctccaagatcacctccatacagatgctgcacactttgtcctggcttgcttggaaggcaaaagccttttccatctcatgttcaaatgtcgacatacacatcttctcatgagctttcctttgttctgggtcaaaggggtgcaggacttgaagcctgcagatctcacacatgtccccatgcaggtagacacaggcatctccaaaccggcactccccagcagcagcgtaggggcacaattgctgctcgttgctgctatagtagctgctggcctccaagtcgtccaggccagccctgatagcatctagataggaatggggcttcatttccgggctggtctgaggatcactgcagctaccggattattcactgtgctcgggacactcttttcttcagccaggccagtgagatttcggtctctcagcaccagcgtcttcttctctcgcttccccggttcatgcaaatgtgtcctcacaacagatgtggcaatgacagcagaagggtgagggctgggcaagcctgaggatggcaaagagtagcaaaggatgctgcagctgggggctttgtatgatcataactgcagcgtgcaccctatataggcacagtagcccttctggtagtatttgcagatggtggatggcttgctttttgccaggtcatgtgagaacaggcactggctgccttcttgacacacgccatgcataaaatacctgcaggtgacctgcttggtgctcatgggctatgggcttgagtggctctgaaatcttatagctgccagcgccaagacccagcccggccccgccgcgcccggcgcaggcagtcgcatcactctcgagcgcaccacccctgagcctgcatcacctgtcttcttctggtctttctaagccaatcctaacaaatttccaagatttggggtcaaagtaaagcaatatattacttgaaggaaacaccagtttttggttttaagaccccaaaagaaaaatttttcctagtaaatcctaaaaataataaaatttttaaaaaatgaaggattcttcattagtagtcctagactatagggaataaaatagcgtcaaaaaacgttttgaggctagagagatgacttagtagtcaagagcactgacttctcttccaagggactcaggttcaatttccagcgcccacaatgttgctcacaacctaatgtaactccagtcctaggggatccaataggcactgcacacataaatacattctggaaatactcattacataataaaatttcaaaaaatgtctagaaactgttcttaaacaactcaaaagaaaagattcagtaaagcctacattctataagtatcacaacttactgtaggctttacataggacctgagcaatagttagttcccataccccaccttgccctcgctttacatgtatacaccaccttctcctgggcaaatagatagtttttccattattgtcaggctccaccaggtgtggctaaaattcctttgcaaggagatgtaaacatctactcctctttttacatctaagtcccagcaagagaggtgcaatggccctaattcactcttacagaacaatgagtgagcagttaagggcctgaaagttgactgccctaaaacaaccatgctagaacttccgaattcagtgtggatgactaccccaggaccagaatatggagttgtctcccctcccccctaaaccagcctctgtcctttcctgaggccatgggcaattagggtagaattgtaaacagctgggtgggaggtgtggctccagactgccatgaccctccctccccgcctcctcctgtgggaaatgctaatagccaacaaacccagctacagcaatcttatgcaagcgggcacagctggacacatgaagatgatggtagtttggctcagaggatagtcctgtacactttgtgtgactgtcaagcaatgcaatgtgaggaaattctgtgtgcccttgtaaaactctgctgagattttctatgcttttagtccaaatagttacatggggcactccagggaaaactcaaaaccctgagttaaagggacttgagtcactgttcacctgtgtccttgaatgactacactgcttgcctaggtgggtgtattgactctgtttgctgatatgaattttatttcatgtctaagactgaacatatatattcttttaccaatttatatttactcaaaacaatggttttacttgtgttacctcatgaaattgccctagtaagtatcttctaacccgatgctatcgctggctccaatgcgtatatgaggagatcaagacacaggcttaaataacatatccaagttcagatggataagcagaagcatagctataatccaaaccagatctaactctggctcatgatcatcctgctattatgtttgagagttttgttacatccttcgatgatatagatttttaatgagctaaataaataaatagatcaaactttagtctttctaacaggtttgagaccttgggaaatactttgacatttggcatggaaggtttatggactctaatgcattgttcctcaagaagcagttggtgtctgtaggcctatctataatctgaattgcattgctacctgtgactgactttcttcatttgatgtcagttgctagagtgagagggttcagagataagatttcatgagtggggtggccacctcagggtaagggtgtagaacccagagtagtgattttcatgattagcatggggaggaaacaagccttttgtctcagtagttccatagcctagaaatgttaagaaacagccctagagaaaagtctcatatatgaatcagttgacagatttaacagataatcttacaaacaataacctgtcctatgaaccacaacaaccatcatggtagaaaaaccctaaggatgcagtagtggcttgttacgataaatctttctgccaaaagccgctgagccccactgccacgtgtgagctctccgccagccacctgctcgagttagggcccaaattaatgcacagagagacttgtattaggtacaatgctgcttggccaatgactaggattctcatctgttagctcagtcttaattatcataaatctatatattttataagacttattttatcagacgccttattggcgtccctccttgccggtggatcacattgctccgctggaggaagagtggaggggaaaagggacgcttcctgtttctccttctttagatatgagtctccttgctatgccacttcctgcctggatccccacttctctactacatttcccagaatcctctttgactcctagtcccgtctaacttgctgtctcattggccaaacagtattttattcaataatcaataagataaacatacaaagaagtacattccccatcagtggctcatatactttggtggtaaccaacaactctctaattagacttaagacctactcaacaagagggaaattctatctagtccccaaaggctcatgtgttgaaagctttgtctatatgtgctggtctattaattaaaacacagagagtagaggcccatttggaggaagcgtgtaactggaactattccttcaaagggtatattttatctttcctttttttctttccctcctggccagcacaaagccagcagctttcctgaatcaggcctttggctacaatgttctttctcaccagaaacaatgagccaagtactcatagaccaaaatctctgacgctgtaaagcaaagtaaatatttcctcttttttttttggatagggtttctctgtgtaaccctggctgtcctggaaattacggtgtagaccaggttggcttcaagctcacaaagatgtgcctgtctctgcctctccagtgctaggattaaaggcgtgctccactgctgtcctccattatgttgacttttctctctcagatattctgttacagtgacccaaagctggctgacacaatatacatgtctgctttgcactaccaggggagagttgagcaatcatgacagagaccatatgaccctaaagactgaatatttcctgcccagccctcaacagaaaatgtctgccactcatgttataagaaaggacaagctgggtggtagtaatttgcatcccagtacttgggaaagaggcaggtgatctctgagttcaagtctgacctggtctacaaagtgagttccaggacagccaaggctacacagggaaatcctgtctctaaaaactagaaaaaccaagaagtaaaaaggaaataaaaatgaaacaaagaaagaaagaaagaaagaaaggaaggaaggaagaaaggaagaaaggaaggaaggaaggaagaaaggaaaaagaacacactggagtctgaaggtgagggtcttgaatagagggactacagtattcaggctttgtctttcagtcaacaaaaccacctaggttccctgaccaagaaggtgctgtgatgacagaagtgtgtctaaggatgctgctgatcttcccctttttttttttttttttttggtttttcgagacagggtttctctgtgtagctttggagcctatcctggcactccctctggagaccaggctggcctcgaactcagagacatcacctgcctctgcctcccgagtgctgggattaaaggcgtgcaccaccaacgcccagctgctgaccttcctttaagtactgaaaaaaaaaaaaatggaactaaaaccaggaagcagaaattagtcagcagctggctactattagtttatacaaggctgttagggtctgtagaccattggtatatatgaattcagatagccttctccatgcatgtcagtggaagatggtctgattatggtaacagggtaaatccttactaatgcctattatcccatcaaagctgattgattcaggccaccaggctctctcagcatctcagtccctacctgttatgaggtcctcctaactggcatgccccacccctaccctaaacttctccaacccagatactgtgctgagctacttttccccatataaccccaccattttggctatgcaggtcctttttggtctcttggcttctggcactcccctctactaatatgtccgggttcagtttgctggtcatgtttactctggactctcccaaatgtctgcctctgcctgtattctcccttctatctataataaaaatctgaaccccttaggagctgtcatgttcaccttttattttttttcctcattcatctggtgatctacccataccacaggaaagtcaaatcagcagcttggttcagagtgacagatttccttggaagggagctagctcatttacaccactcccatggtttcagaaatgaaggaagaatggacatcacctacagtgtgctctcagcaagttacagcccagtaagccagtatgaggccaagagaatgaggagttcactttgggcccttctacatgactctaataaatactaatatgatctcctacaatactgaggctgcgcatgacttctagggaggtacagttataaacacatttataggtgtttaaattataattgaaacaacatattgctttatactgattgtttcattgaaataaaaatcacctctttccagatctcaaatacctagctagcaattttagggaaggagcagaaaatgattttctaaaacccaaagccaccaagattttcactgaaagtcacatatgaagtgtagtatcttaaaacaaaacaaaacatggtgcaatctgatttctgttgcttttgaaatggacaaagaggagcaatataaaacagataaaacaagtgataaatggataatttgttcttatggagagacaaacacagagaaggatagaggctgaataaaaagtgggaggggatgtgctgtcagaaatttcagtagagaaagacaggggtcatcctttgcttcatacaagacccacaggctgtatcctttggtgggtgtcatggcgtatctatggtatctatgactccagttgaaaatatcatagccttaaatgttaccctactcccagagagggaaagttaaagctcgcaagtagtgctttaatagaagtttctagacacaaaaataaatgagctgatcaatgtaatagacaaaaaggtctatgaacaaataaatgatataggcatagtcatctgtcttttgacactaaagtaaaatggggaagtgatattttcaacatagtaagtggtacaaagacaattagatctacatagaaaaatgtgttttgatctctgtctcacatttatatgcacacacatacacccaaagttctggaaggattttatctaaatgtgaaacaaaacaagaacaattttagaaaaagggagaaataattcttcattaattttgagtaaacaaaatctgcttacagtagtatgcaaaaaatagtcctagcataaggaaaagactgacaagctgaaatatttgcaatgagtttctgttgatcaagtaattccatcaagagagataacagacaacccatcagcagatgtagggaaagacaaactcagttcatctatctgtcaaggaattgtctgtaggacctccaatggatcactacaacatcaagaggacagtctatctttttgtgtcttttcctcttttatttatttttagttatatgtatgtatgtatgtctgagggcatatgtacacaggaatgcaggtgccagcagaggccagaagcagtggatctctccaaagctggagttacaggcagttgtgggttggcagacacagatgctacaaaccaaacttaggtcctccatgtgagcagtacatctccccctactcttacacatttttatttgtggggctacatcccaagactcccatggatgaccaaaacagtaggcagtactgaaccttacatacattatgttttctacatacacccacatagatacatgtcatacacatgcatatatgtaatatacatggcaaatgttaatttataaattacatacagaaatattaaaactgtgagaatagaatataggaatagtttctctttctgaaaatgtcttattgtaatgtagatcttagcagccttgggatatgatcttttttccttattgagtcaagaatttttatactttaacttaaagggaagcatgttatgacttcttgttgttatatgccaatttccatcaacactactaataatggctttagggccattattaagtgaaataagggacacttggacacaagcattgcaatctgtgacaattgatctgatgaaccaggctacttctatgtgaccagtaggcaggtagctatgcaacaaggcccccctcaggaagcccatggctcagtcatggcagagagggatgagtgatcgtagacttccatggtttatttttgacagttttctgtcttctgtgctattcagcttttagaggaggaggggctatgtccataaacctgagagtatatttcagccgtcatgttcttgaaggtggatgtctaaatcatttgtgtattccccaaaatgccaagtgagtagagcaggcagctagtgaatagagatagagaaggtaaatcatcatttattgtgtgtggactctgatccagtcagaaaccagctgggtcattgttgtgttctgtttgttttcagtttgactcaataagactgacacatttaacttgaggtctgaaaagagggaaagcttcctgctaaaaagctctttgttgtaaaataagcaaagaatgaatcatctttcctaaaaacaaaataaaacatggtttatccaaaatcgacattcgttgaattatcctaaatatgttatccagtgtatgtttagctttgcagtaattccacactgactgatatgaaagacccagacatctctaaagaaattgatgccagaaatttaaatgcaaaaattgaaaataaattccagttgattttgatattatacagaatcactgtgcatgaatttagttcttcagtctgccacaactacaattagtatgtgtactaattaaagacaggtataaaagttaaacactttgggggatgggtggagagatggctcagtggttaaagcagccattactcttgcccaggacctgggctcattttccagcacccacatggtggctcacaactatccaggactccagttccaggagatctgatgccctttactgacctctgtgggtaccagggatgcatgtgggggaatttatatgcatacaggcaaaacattcctactcataacataaaataaataaatacatataaaaactttttaaaattaaacttaacacgtattttttaacttaataaaatttaggctaccttttaagtactttgtaccagtaataatcaggatggatatagagcccttggatcttaaaataatttgataatcattttcctgcaatcaacaatacaaaatatcgatacaaatatgggtttcctgctgcctatcaatgccaagcaatctaccaaacactaagatagtaagtggacagtcctgactccattcaccatatgaaaacagactcagggaagctagatgacaagtctaaggtcatgactggcttcggtttttaaggcactctcctgcccttcccaagtgtgtataggtttctcggtacacacatgtttttctttcacaatcagtagtcagagtcctgacttgcacaaaaaggtttttgttttggtttagttttggtttttttgtttgtttgtactccctccccccccagttacccccacccccagaagtctagattattcaaatctctttgaagtcttcaacacctacagtgttctagaaagagatcattttattgggtttcatatacattcacattcataacttagttcaagcttattaagctatctgatattcagaaagaagaaacgattggcagaaaaggttttgtctggttgggtgacagttattgctgcttgtttgttttgttctgctatagatgtgtcctggcgttttcctcagttttcagcagtgcaacaaaagttctcacaatgagtttcagctatgcacgtcacagtctattaagtaatgtctcgtagtctttctcctttcctttttctccactacaagctttgaggcgataatatatttttgtgattttttttttaaggctggaatacctaatctccaagcagacagctaaatttgccaggaagaaaccaagatattaagtgagagggaaagcctaggtttaggggatttcaagactcaacacaggccccatattactgaccaaaaaaaacccccacagctgttttgccaaacttcacttgcaagagtgtgttaacacacactcatttctcagactgcacagatggaagtgaggctcattcctgggagttagtatgatgtagatctcgccatcatttcatcctcggaaacataaataatgggctggtgtgatgcatttgttcgtctgcaatgccccagatccaaccctacagctgcatagtcagatcccctgaataaacaatctgctgtgtgtccataaatcagaccctatgcctggaaggaaacttgccaaaaattataaaagaaaatgaattgattcgggctgaattctggtctacactgaaattcaagggacagtgaattgagcttttaaattctctgatttttatattatccttatatattaacagaattaacattgtcttaaagtgaaggaaagaaagcccttggaaggcaaataattgagctctgaccttgaattataacttagttatctgaaataataatatgcttacaacattcaaaagcagctgagtggtggtggtggcacatgcctttgatcccagcacccaggaggcagaggcagaggcaggtggatgtctgttaagtttgaggacagcctagtatacagagttccaggacagccaggactacacagtgataccctgtcttgaaaaaaattaagagatacaagaggcagtttgttgaaatttgcctactagggttccaatttaccacaaaaggcattttctatcaatttctcattcattcttctaaacatgtattttttttgcaaatacaagccaaatgcaattttttcttttcccaaagtgcaaaatttgtatttgatgaacagacacatatagcccataatgtaaaaattaaggatatagattacccatacttagcacctagaatgcaaatgaatattcatataatataccatcccgagtaaagtgtaatgtatcctttgttctttatttttcctaacaataggtacatcttagagattgttcccatattagccccaaaaggattccttatttgcttttgtagttgtctactaaagtagtctattgttgagatatacccgcacttatttaatcagttccttgttaacaggtattgaggttgttttaaatgttcggtcattctgaaaaaaggtacaatggataagcttatgtatgtgacaatttgcacacatgggaaacttcagaaatggaaatgctaggtcatgtgtgatctgatagaaattgccagcttatccaccacagaggcagtgccactagacatccccactgcctgtgtaaggaagcccaaagggtctttgttatactgtctggaagaagtcactttctgtgccatccagggttggcaactgctcccgatgcagtggccacggtgagtctgctgtcctctgcaaaggactctgaggccttaggagacttttttttagcttaaatttgagggtggttactttacaagggaaagaagtctcttgggcttatgttttcagaggtttcagggtccaaatcggcaccgcacatctagcaaaggccttggatagcaccagtgcacagtgagaagcatcatgtggcagaactcacatgagagaggtgagcagtgtgcagtgcggaaggcatcgcagaggaagagatgaaaacagggagccagcaaaggaaactgagatctcatcagaacaaccacgatatgaattaatcccatccaaaccatccatgagagaggttagcttcccacaataaccagatggcctgacgcacttcccatagaaagtcatcaattcctcttcaggactagtcatcagctcctaaaggatccatcccatccacaccactgctttggagaccaagtttccagtttatgcctatctgagggacaaaccatgtccaagtcaaacctcatctgttcagaattcaccatcttatcttctcaaagtccccaggcatcatcctaaatgcttatattctaacacatgaattaatggtcattaattttttctttgattttttttttcaagacagggtttctctgtgtagctttggagcctatcctggtactcactctggagaccaggctggcctcgaactcacagagatccacctgcctctgcctctgcctcccgagtgctgggattaaaggcgtgcgccactcccggcccggtcattaatattttaaatgaatgtttacattgtctcttccgtgagactgcaagctccatgaaggcatatagagtatttctttgattccttcacaattcccagtaaaatgtaaatgtgagtcactgagctgtttgtagtgggagtggaagactaacttctgaggctaaatggcactttgtttttctcagctttggtgttggctgggagaggaagattgattcttagactacaaaggtgtgtgtgtgtgtgtgtgtaggtggaagacaccattcagagaaaagacattaatcaacatgttgaaacatgatccaaccctgtcgtgggaccttctgctggtaagtccattgattgtccaaggactgccatagacgatagtgtgtcattattactataaagatacagatcttcctttaaaaacaccaggagtgggctgtatgttactaggaacagccaccatgctttgagagtatctgatgtcaagaaattatccaaaggtcaaaagcttcttcaggctgaattgctgaggaaatgatcaagagagacaacacatgcaaagatccacaccttagttaatggtgagtgtgatgatatttgttttttcttaaaaaaaaaaaaaaacctacagattttccctgtggttccagagaagtcttgggttctgaactttacttagttcgaggtttctcacttccttttcagagcctggcgactaaagagcatgcatcgtcacagagtaatgctagcacacctccaggttcacagacctgagtgtgctcttggagcaaagcccttcaggtccccggttctgggtgacccactctttctcttcccaccccacccccagatctccaatttggatggaagacttttgaatgttttcttcatattttcccaaacctataaagcaaaagagactgaaagtgctttatagattttgttatgttttggagacagggtttctctgtgtagccctggctgtcctggaactctgtagatcaggctggcctcaaactcacagagatccacctgcctttgcctctccagcttaacagagttttaagatttatttttattttgtggatttgaaatatatatatatatatatatatatatatatatatatatatcacgtgccttcagtacccagggtccagaagaggtcactggattgactgattgattccctggaaggtggttgtgaaggaccatgtgatgctatgaactgaacctgtgtcccctgcaagagcaacagtgctcttaaccatgaaactctctccagcgcctaatagattatttttaatgaatcattttgatggttttcatcattcatattcagtaacatgctatgtaaagataaaagctgtagggagggtagagaataaagacagggatgcaggaattctaagtgacttttttctactggaggttaaacagaatggcttaagaaacaaatgtttaataaataaaatattttattaaattaatgcaacacaatgacaattagatgcaaaataaattttccagttatagtgatacacaacacaaaggtataaagtgcatttacaatccaacaccatgagatggtgttaagatttcaagtaaagtggataaattgaatgtctcactcaactgtatctgttcttaaacttcacacaaataagacattgccatgagaatcatcccgcaaacacacttgggttaacaggtaacagaagggttcctttggggaccaggttggcttggaactctatgtagcccaggttgggcttcaactcacagagatctgcctgcctctgcctcctgaatgctgggattagagactatttcttcagtcttgacatgtgacaaaacaaagaagattgaaagaaagctctgggctccttgtcccttcctcccccaagaagcactgattctcaaatccactggaaactgttatcttagaggcctctgtgctgatgagagccttcaaggcctcacatagagctgatggacttttcctggtgctggtccaaatggccaacaatccagcagcaatgctggaatttccggggagaacctctaataagcaagtggatcatctgtgtttgagaaaagcagtagaggagaaacaacagtgacaacagggctctagatctgcttctgtcactgagtttcaaataaggctgccccttggtattgggttgactcagtagaccctggcgactcatggtctccctttgaacagacacaaaaataaggcaaacacaaacttagtcagtgagtaagtgctctacaaatggtattttacaggcacagacagcagacacggtgcctggcctagacagtgtgaaaggcccctggagggatgggaaggaaaacctagaaatgaggcagttcccttcttggatcttgaagtaggttctagcagctgcataaggatccatacattaaataaaaagggcaaggtgtacaacaaatgcacagtgagctaccattgaggagtttaaaaaatatagttactttaacatctatttctacatattaactgtctttggggaaatatatgtacaaaaaaaaaaaaaaaaaaacggaagggagtagcatggctagggtgatggaatagagttttgttttgtttgtctctgggaccattctgaatcagctccctgttgacatgtatttggattgcatgtgtgttcatgagcacgagggtgtttgtaggtttgtgagtgtgtggtgcccgtgtgtgagtgtgagtgtgtgtgtgtgtgtgtgtgtgtgtgtgtgtgtgtgtgtgtgtgtaggcatcatttctcaggcactgtctacatcattttttttttttttttgagatagcagctcttataaggcagagcttaccaagcaggttaggccagctagccaaggagattagggatctgcctgcctctgcctgcctggcactaggatcgaaagcatgcagacacacccaactgttttttatgtgggttctggggaacaaactcaggatttcatatcatgaggaaagtattttacagctgagctatctctccagccctcaatattatctagatagaaagatttaaaaaaaagaacttttaaacaatactagatattatatggaggacatgatattgtatgacaaagataacaaatcagggataaatataatgttagacaaggaactcaagagttactttccagagtcttttaaatatagacttcttgctaatgagcattgctttgagtattgaacatgcataagcatagccagccagtactctggcttacatatctatgctcaagggccagcacagtacaagaggcatggtgtgatatgcaatgcttcttaataagccgttttttaaaattcatttcttagctacaaattgtatcctcaaaggacagtggctgaaagagatctgatagctgttgttccatgggcaagctacttaactgctcaacttcttgggctgtgaagtgaatataatagagattaacatgagggttactatggagatgaaatgagattgtacttgtgaagctgacacttaaacggaacagctactaccaccaagcctcgaggactgagaataaagattactccactcaaacagcaagagccctgtcaaaccaatcttgggtcctccgtgtgtcctggttgtaccagtagttacagaggacaccaagtacctagcagatgtgcatgctttctagcctatggacaaggtgatcagcagcagttgagtttggtgactacattttaacatctattatggcttcagaatgcatcagtcacaactacactcccacgacaagcacacacacgtacacacacacactcgaaataaatagaaaacacgcacacttcaacacttgcgactctccatctcccatccaggcactgagtggaggaaaagggcacttcttcaaggaccagatgttaagtcggggattctcaagccacttttccaagatggacaacttgctgattggtgtctcctgaagaaatgtcctttgtgccaggctccccttccaatactttctttgttcttttctcttcccaggttccattttgagtccttggccccacatgtcaaggatcccttcctccacagcccacagactggcaatcccgccttgatgatctgagtcctcagctctgcttacgtctcctcgaactgcatatctaaagagggatgatagtatagtgattccacaggggcagggactgtgttgggagatgtaggaagaaatgggcctttgctaggtcatataataatgctgcaataagacagagacaagttctgtgccgagtgatgaaagatgcctaccagtgcttgtttgtctggggctgccctggttttaaaatggaaagtctgagcaagttaggctggttcctcagggtggttctgcagcatcgatggcagcgcccacgagggagccacctgggtcttcacaagctcatcagaccactttaatcgtagatttgggttccaataacatcaaaatgagttagagaacttaatataacttatttaaaatgtagagcagttggctgggtaagggttttctactcttataaataaagtcattggtagcagaatgaattgaagcacacaggataagagcaaaagtccacggtaaagctgtgtgttcctccccaccttatttcatcgtcccagctctgctttctctactataaaatggaggtggttctcatatttatatgagtacttgggggcagggtaagagaaatgaaatgccatatcccacacatgaaacagttaacagctaaccacacagcagaatcgtttgtacaattacacgctcatctaactcagcactgtccctggtcgcatggcccctccatgggtagtagccgcagcctagacagaagcacctccccttcgtgattctctttgcataaagctgctggctaagagctttacagggaaatcccagaatttcctcagttgagagagttgtgaggctgaggttgaggagccagcagtgcccacaaacagcctccttaggaaagaggagagatcatgagtggtagatttctcttgttataatagcctgttttgtttttgttttgtttcgttttgttcttttttggtttttgctacgtggttcagctggctcgtcactcatcctccccctgcctcagcctccgggctctggagtggcagggccatgcttggctgcttcgtccttcacttgccttcagtttgcccctcctttctattagctacacttaccattttggagttttgagtttgtatcttcggtgtcacatttttccacgtctagagttctcactaaatgagaagaaatggatctttaattccatagagcacaacactaccacccacagcaactcaagtttcatcaattcaaggtgattaacccttcatcaccaggcctttacatgaacttccttattcttggtcccagactccgaacaatttacatactcccccctctccctccctctctccttctcttccccctcccctccctctctccctccccccctccctctctttctctctgtcagattgtctacgttgtttccctcagagatggcggacgtcctgagctactttatgccgtcctgaatctcctccgtcattctcattctcagccaatccttccagatccaatttggcaacaactgcttccttgtgcaagtccaagtccagtccttgtccacacgtgtcactgaaacttaatgctactacgtcatggccaccctcttggttctcgtcagagctgattctttggaagcagctggttgccattccctcagttacatcacttcacacagacactgatcctcagaagggacggaggggaattcctctctgaagactggagttcacttccattttctacttccctatttggcttcagacaaatgcatacatcactggctctcttggtatgaatctcaaagcactggggggaaatgtttattctaagtcatcttacaacaggaagacatcatttgaatgtacttgtcttcctagattttaatcattcttatgggtaaacactgaaataagtacatgaaaagtatttaagacaacatgtcatattgcctccagaaatcttgtaaaagaaattctttgtggtaaagatacaagtttgagacagaaatgttttccaacttaaggtacccagaatctaactcaataggatgtcacaaggaatgccttgaattcaactgaaaccaataggtaccaaggggctcttcaaagtctgtggctattggcatgtagaaagaaactttatggaggtcttcttcagcctccatggctacccaccctttacctcacctctgcactacacacagcagccttactgtgaactactcaacattggaccccgaagtgctaccttgagaactattttagcttctctaagcccttgtccaactcatacccctccaaaatgcaccatggttcaaggccacagtcccaggtagatgttacaaaacatcaacaggagcaggtgtaggggaagctgtagccacgccttcttaggggctggctacaggagtacctgagggcttgtgagggcgtggtgagagtgagtagggggactgcgtttcgttttcggtttctctttgcttcttgctgtacagactaccaccggctggctggttcgctctgtaagtaaggcttttccctattaaatacccttatatttctacctgactccgtattggtaatttcccactataagcaggactaaaggaagacttagcacactggctcactggagtcacagctcctacttactttgtttaactgaaagtgagccctgaaagtgaaaggccaagtgtttcccagagacgcttgctctgctagcctgttgggacaggcatctccctgtggtgtggggctgcccttatcaagtcagggtgaacaccatctctggcactgcctactcagtatcgtggcaagaagaccctcatgtacttccccataggcagcacagaaaccaccgcaatgaagggaataccttgttttcttatgcagaagatgatgactatggatgctaccagaaacagcagtagcaatcccagaagtacccagtgagtcctcttatttgggagaaattctgcaggtggttctgaaaaaacgaaataaaaagatgctgactaaagataaagttttgataagaaatagtcaggagaatgatcattcttgaaatctagtttggctttaggataatcttaattactaaaagctaatggccagttaaggtctggaaggatccaggcttgcacacatgcaagagactggattctgctgcttcagattgtctttgaaacctcaaaagtcctttatccagcctataaaatggaaattctaggaatttcttgtgaggctgtctgtgacatatttagcctagtgccacagaaagcgactgcactattagttacatggtgagctcagtgaagtaagttccttgtacactgtttaatatagattctaacagccaacacagcatggaaggcctactctagaatatgggggagcactaggcactgttaaacagccttagcctcccacacctgtggtcatgatcagggaccaatgcttgcttttcttctcccacgtctgaaactctctggacattctagtcattggcatctcttgtcagtttctttgtctgacgtcttgtgaaagatgggtctcatagcacaaggatgctttgggattgacaattcctatctcttgttgtaagtcagttcctatgtccttactatgaatcaactgagatctacaatacttcactacacagtctataaaacctgttcacacatattttatttacatttcaaagtaacattatgctagacctaccaagtatttcttagaaaaacaaaacacaagttacagacaagaagacagagtggctaagtaagttactccaggatgccccacaaataaacagctttttgttgttttattatgatggtttgtttgttttctttttgaggcagagtctcttgtaatccatgctggccttgaacttgccaagcagctgaggatgaccttgaacttctgattctcttgcttccaccacccaagtgtttggattacaggtgagccctacatcaccaggcttatctggtgctgggtacctgctctttgtggatgctggacaagtactctcccaactgagctacatctccagcctcatgaaacagcatttaatggcaggaatctagtaatgcagcttttatgagagagtccaattccagttagaatatcttccttgttttctaaatttgtctgctctctctggttccaaacccacccggggctgaattttcatattagttgacttttctctgtagttttatttattttctctaaacgtattagagcactgctgtcgaggtacactaagggacaaatggaggcagaagcaactctcctcagaatatctctggatttatgtcctcataatgctctgagcttgactgtccctatccatcccacctgtttcagtaaactaacaagtttacaaaacagctgaacttacacaggcaaggatctcaaataatttgcatacactacagctcatttgatccctacagtagccttgcctggtgacttataacccttacagggagagcaaactacatagaaatctagtaggttgccaagagacatgagcctcatgttctaggcacaaggcagatttcctggagttgagacatcagagaatgcctcaaagagggttacagggggaaagaatccttcatatggagaataagagggaaggacaacgcattcactccctactgcagaaggcctagagagaagagggcagctccgtgtgataaggtttcaattcctgaagcataagctgagtcattcccatctggtgccccagatacaagagtgtttcctacacttcagctgtcccctgttttgctggagcacagtgacttttgtcctcgtcatctatggatcctcaatgcctaacatacagtttgtcacaggtgaatactcagtaaatacttgttgaatgtttactaagtagcattatagcttgcatgcaagaaaatagcatacatttagaaacataagtattgtttattcatgcactcagccagctactactgaaagactatgatgggcagtcatcatcctaggggacaagggacagagttagtcagtttacctgggatgatcaactcagctgtgtggttttcccccgactgtaatctccaaaaagtacagtagaaaacatcattagttgtcgcgttgatcctcagagtgctggtcacattgaaaagagtctcctctgtctgggaggtggtgacagtagtattgccaatcagggtttgtttgtcactgtttgtccagatgacttcagcttctgggtagccctcagcctgacatgttagttcatactcggatgtgactggatccatggaaattctgtggttgatttttcggtatggggctaagccataagcaaaaagaggtcagggctctctcccattgcaggtgttacaaagagtatcaacttgggccagttcttggggaactatgtctccagctcagctattttggctgcagggagtgtttgttagtctgactcaggtcttctgctcaaatctaggccaagtttgggcttaaggaacaatcacattgctgtaataatcacattgatgtgttttgttgggctcaaactaaatctatcaactaaataaagtaaattatcatcttgaaaccaaaggtcttcctatctaaacatgaactatatctatttagccaaagacataagagcgttgtagtatatcttcacagaaatttgacacagagcaattaggataaaacaaaactgaaataatgacaggaagttttgttgcccttgaatcaagaaaataaccatcaataaaataggtataattatgatttgaaaacacaaaagtaaggggcttttatgagcacgtgagccctcaggcttgtattcatcatattaattaaaaatgaaatcaccaattttgccctattgaaataggcataatgactcatgaaataacgtcaccacaatagggtctatcccacattgcacatgacttagtttttctgggaaattaaaggtttaaatttaaaatcactgtcaatgataaaacgtttggaatgaaatatttgccttctattatcatttctcctgggagttaattgaaggagaacagtgcttcatttagaggacatggtgaactaatgagtagatccatccataactgattaaacctccacagctttcatctctgagatgggcacatgtgtgaagatgccacaagaaaacattagaacttctacttacgtgtttgatatagtacctgttaaattacttatgcctcacacatgttgacagcagtcactgtaccttactgactgccacaggaagaggggagggtattgattcatatttaggttactatggatttttcaaattctcctgtctatttttttttgttttgtttttgagaaagagtttcatgtagaccgggctagccttgaacttgctatgtggccaaagatgatctgtctctacctcctgagtgctggaattacaggcaagtgtaaccaccacacctggttttaaaccaaaacttcatgaatggtaggcaagcactctaccagataagctaaggaaccatctcctttgtctacttttaattgaactaacctttttttttttttaaaaaaatgagctcattcaaaagtctccttgcagaaacggaggcttgaagataaggctaacaattcaacacaaagcaaaacaaccactttctgaagttaaaaaaaaacactgagttggataggagaaagtattgattaaaataaacttcaagattattgagaccatctccatttgttaatgacgaatttcatcataacatagcctgatgctaccacaattggcaagacattacacatattgtttattccatttacttctcctttcaagatgtctatttatgtccatttcaagaatgttatcatgtattaggttgaaccaactgtatgaaatcagagacagttatcttcttttgatcttcaaaatgacaatttcttacgctatataagccgtgcattggcatcaaatttattgtttataatcatgcacaagcttataatactttacagaaaggggagacaagcaagttttgttttgtttgttttgaaacctctggtttaaatctagaacactatgctacctagtttactgatcaaaaccacaaaaagttcgagttagttttaaagctgttctaagcttgatgcacactccagaagtacaaagatggtcaacaaagcacagtaagggcatagattttagaaacaggctagttaggtttagaacctggttttacaatttttagctgggtagaatttgggcaaactgcattatttctttagacttcaacttttaaaatcttaaaatgggaagaataatgtatcattgaatctaagatgtcatctattgaaagacacattcatatttgaaagatagtaaataggaaaaaaatagcatggccatgatcaagtgcttccttcataaaatcatgttaaaggttaagtggattcatataagcaaagagtgcagggcatggcctaacacagattaggagttgcataagtgttaactataacaatgctcctgccatcaccagtcagatgaggaggaccataagcacagctgtttctccccctttcatcactacttcagtggctcttcagaaagttctcatagctcacaacaaacagtctaggaaataaattttcccatattcaaccctgttcatatagcaagtgttttcagctgatgatttttgaaacaaccatctctccctttaacaaatgttattttcttttcttactgtactggaacatcattatatgccaaggcctaggggtacaacaatgaataaaacagacccaaacccctgaccctgcagtttgtgttcaagaagaaggaacaagacagtaaatatgatatcccgaggcacgttagatagggatagatgacatagaaaagatttaaacagggtccaaggatttgctgagccatgacaatccttaatcttttatccagatgattaaggtgtttcctacagctgcttaatatcatttaaggtcccagcaatattaaatggacatttcattttttttctgatattaagttcagtgactaaagctaaagatttcaattgaaatccagatgcatggggtcttctggaagcataatagcacccaaagagataatgataattgagttaatacaaaactacacccttccagatttcagttttgaaatgcttcacctttaaaatcccatggtgggttaactccctcccgggaagctgtattaccacacacttacagatgggaagagaagaggggcagccttactgtgaaatcatttgcataggagatgactcaggagttctacttcctctgcacgcaaagctcctatgtgccagccaccaacgtgctagggatcaaacacagggtcctacacatgctgggcaagtattctacctctgagctatgtcctcagtccagttcccatttttatttttatttatttttttgtagaaaggatcttgctaatttgcccaggctgctcttgaacgtgatatatatcctagacaagacacaaaactgtgattctcctgcctcagcctcccaaatagccacgattacagatttgagccacaacacacaccaaagccaaggtccagatacttggtctagctcagctaagctctgaaagcactgactgaaagcaaatgacaagatgaattgggagcagaacgccaatgtagcaatgtctaaaagaaaacaagaagaccttcaagtctccttggttatcacctttgccccatcagagatcccttcacggagaagccagcaattccagaaggttgccttttgcatcagagatattattgagcagataatttagaatacattcttcctcaccacaaaatcagctactctcaagaagccatgagatacctctggacacagacttaaactccatgcttccttcttcctgactgcaggggctgttctttcccccactccaggttcagcttgacttgactgttaatggccttgactgttaatgaccttcgggcttcataattcctttaaatgtcttggaacaaaatagatacctcatatttgctgatgtactaacacatgctcaatttatgaacaaccacattccttctttcatgaaggtcacaaatgaaaaattgtaagtaaaaggcaatgaccataaagcctaaaagacaagtgatattttcataactatgatagctctaagtgatccaacatcagagatccattaatataccatcaaatgggcacacttttcctatctctatataatttttaggtaatagttatcttgatcccttatgagaaacgtgaacttttcctattaataatatattgaccttcacactagcttaggaataaaaagatcaagggagattatctaattttagtggatatttaaaaacttattatgaaaataaaaagaagcaggcagatcatctcaaatttaagcttgaagaagacagaattcagctcactatcaatcagggagaagtttcaggggaccaccgaagggggttccaaattggagggatgccaatgggatgccttgggggattcctggttttggcaggcactggaattgtctgtgtgcatgcctgggatgggtgcagctctcagttctgtgaaacccaacagtgaaagcaggggtggttagtaaggtatttccctttccttagctagttccagtcccaaaccttgaactcaagtgacctgatgacatttttttttttttttgtgggtccttatccaggaacttaactagcagttcttcctcaacactcccaagtaacactaatacaagcttcggagacagatgtgcagcttgtaccatttctgtgaaagaatggcttcttctatacttatcatcatttgcatctgaatgtgaaccttacagtaggcagtatgtatgtatgtatgtatgtatgtatgtatgtatgtatgtatatacattgtatttggttttgtatggagatacccaaagaaaggaaaatgtgctaagcctgatagaatttttaaaaatccaatacaaaggttctggagggatacacaaatagtatatgcatgccatggatgatggtgctgaatggaggattcctttccatgatatctgaaatatatatatatatatatatattatatatatatatatatatatatagcaaacacctggcatttaatctttgaaatcttacagaactgcagagcagagcatggctgtgtattatctattactggatctccaattactgtcaaacacaggtgctaggagtattcattgatggagtgaatgaatgaatgaatgaatgaataaacagacttagttttctgtgaaaagtaggtgtggacttccaacagtgaaaagctctcaacatgacagagatgtcttaaatacaggtcaaggcttcgttaccgggagaattcttaccattgactttcagcgtgatccgcttgtagtctgctccaccgtagctgatcatgcaacagtaaatacctgcatccaggagtttcacatttgtgatctgaagcccagcatttcccattaaaatttgctcctttggcaaccagaatctccccattaagtgttgctgcttcaggtctgtctttccatctacaaactgaataactggattgtcgtacttttcccagtagacaactaacgaaagcagttccagccggtgtgttactgggaatctgcattccagtgtgacattgctgccatactctacctcatacaggtccttgggaaccgtgatagtaaatgctggaaagaaagaagaccagccttcagcagacggaaaagtcctccaagcacatttgtaaaatgggtaaaaggttacaatcactttatggttgtaatcactttatctggtgagttgcatgaacactaaaattcttcttggaaatatcttcattgggaagaatgcaagcgaattagtatattcccaatcttctttaaaaggaaccaataaataaaagtatattaccattgggtcatttccccagaaattttcataagttattcatgggaaatggataatctttttgttttgtattacctgtatttttagcttcacccctccctgtttttttgtttctagtgctgggatattgactccagaacattgctcaggccaggcaagtgttccactactaaattatacctacagctcctgtattttccttcatcttttacaatgatacaagtaacttgtttatgaagaaggaaaactagagtgtgctttttaacaaacaaagtatgttcctttaaattattgcaggagcttgggtgatcacccagtaagtaaactacttgctgtgcaacatgagaacccaagttcacatcccagaacctatgtacaaaccagctactgtagtgtgtgcctgccatctcaatctcagttctcctacagtgtgatgggaggaagtgacaggagaatccccagaaagtttggagccagctgcctgcagtactcagcaatgaacaacaaataagagaacttgtcttaaacaagctagaaggtgaggacaaacactcaaggctatcctatgacctccacatgtgtgcctagcaaatgcgcgcgcgcgcgtgcgcacacacacacacacacacacacacacacacacacacacacacacacacttcatatgcatacacacaaattacttcaatttttaactcatggctagaatattgaaaatacagaacccactgaaaagatttggtgacttaccatttaccaagtgacagcagactgtgaagatggcaacaatggcgcataccctcatgtttcttgagctgtctagtaatgggaaacacagaaagagcactgcttaattcaaacagctgaacaatgtgacacccgtataagatttgtccttctcatagataaataactcctaagagccagtacgaaaagcacagacaagccaggtgtaattgaagcagttttgatttgtaagtgtggaaacacagctgcaaagttgaaaggtcaatactttcatttcataactcaaggttatacagaaccaagtgaaaagaaattagtatgatgagatgaacatttgtatattgagttataagcccctccccacattcaataatgtacattaaaaataagccaagggaaaaataccttcccagctcctccagctgcaccatgcccttttcaagatctgtaaaacctgccttaggcaaaacttcacagcaaagaaaatctgattctcactttcactttccagtgcttcctacccccttaaaaatctccctcccctgtgcttctcccctactccagattataatccttctccccaataaagagagtaggtataccaataacagcagtgggaagagaggagaattctatttggcccatttactaaggtctgggtgcctcaggaccactctctgagatgtagctgtctagatcctagtttccattgtgctgacattttcctaattcactcagtaaaccctgaatatctcttcttgagtctggcactagttagggcactggaggagcagtgagcaggaaacagaagccattcttctttggaactgatgtccaaagaagagagtggtcaacgaaagctagagctacaccccagccatgttcattaacatttcctctctccagtgtcattcacatttacaactttcacaggaaagtcagttttcccaggaagcatctccctaactatacacaatccatttgacaggcatatacagcagaagactagggttgctgggtattcactctctaaaactcagtaagaaaacgatacatgggtcaagaggaaaatgaacaagagccccgcatagttcagagaataataaatacaaacataggaaaggatgctctttctaagaatgtatattggagatttatggtaacattgttgaccttttgctcgaccaaaattatagcttcctcatagttaggaaaaatacaggtggacagtatttcttgactttccattggtaaggatgtgaaattgtatagcttcttaaagatcaccttggtaatctctgttaaaactttaactatgtataccatatggctctttattcctgacttagaaattcaccatatggaaaaaagtaaacacaaatataacagggatggcatgggtgacagcagctccagatttgaaacaccccatgtagcctaatggcaaaataaaactgtatacattcaaaataccatgaaggacagaatttagtacatgcatagggaatgagtttgtgaagatgtaggaaggaacttggaggcagtgtataaagcaaaactatacttgtggtttataacaaccctaaccatgattatctgctgtgaaatgtgacttttgcaggaagcacaggtaagttctcacccatttatcattttttaaagaaagaaagacagaagaagagagatagaatcatgaatggtttcttcttttttcgtgtgtgtgtgtgtgtgtgtgtgtgtgtgtgtgtgtgtgtgtgtgtgtgcccaattttcaaatgagtgaataaacaaacgttttacttttattattctaagaaaaaactaatgctttcaacttctgagtgtttggcggacaaagtgattccatgggaagcccctagaaatggagtctagacatcttcactgaggtagaatgaccacattagtttatttttatgttttgttgttattgtcataaaaactaatgtaagtgcataacatacactccttcagggaatgcttggtaatatcagctaacatatttggttgccgaagtttgcttgggaggaggagagttgatactgatgtgataaaatagaggctggaatgctaccaagacctctccccaggcataggacagcacctgatggcagagacagagatggcccatggtgccactcatgtcaaaattgtaagtatttgtgtatttagccaatttggtgagtccctattgtgtgccaggtccaaggttaggcctggaaggtagagttccctaaagagacttgctgaccaagggagaaaaaggactttcccaatattcgtgacgcgttgtgaaaattggtaccattgtgttttcacccagcgctgacattttaaaactttttgctaattctattcttgagaaacacaacttgaattttttgaagaaatgtttagttcttgataattgtctgattaaattattttgtctgttaaggtcataggcttcttattggctattatgaacccttgatattagaaaaagagcagatgcaacagcttctgagaggctgaggcaggaggatcttgagtttgaggtcagcctgggctacatagtgagactctgtctttaaaaggggggggcatttatcaaaagagcaaagtaaaatagctcattatcctcttgctaatattagacacatatttaaaattgttccctccagtcatctgtccaaggatgtgatgacatccaggctggtgaggatgtcaggacacagcaattgtggcaatgaggctgtaggagaaaatggccaagccacgtactggagagtcataccaaggtatctgatatctgttgaaggactacagggccatgcctgattttgtcaatattgacagtagacttggttggaatagttatccattaattatgaatctgctttaaaagcttagtacgataaaggtttactaaaaggttatggattaggcccaatagtcaccttattcagtatcataccctctcctccctggcccccagagtgcagctctcggtagtgtgagagaaaaagaggaagtccagggaccatgtctgtgaccttggcacctgctccgtttagtgggtctaagagcacaggatcattttcctccggcaagaattgtaacttttcatgaattcccagccaagagcagagacacagcaaggaagtactgactgaggaagaaatgatggctcctttaagatggggaaataggtttgtcccggggaaagtccagaagaatatcatggaacaccacttctctatcttcccatgagagcaggaggggagcagatgcaagcttcctttctcaaaagtaagagtgaagatataccaaattttcaaattttattaaatgatcctaaaacctgtgtccctctcggtcccacctaaaagcctgtaactacctatgctgtacaattggaaaaggctaatatttgcaaagtagaaagttctccttaaatattcctagtcactgtcattggcagctgcatatactttcgggaacgaatcttcagttttgttttatattccatacaaaggtctttcagataccctgacataattaggtagctataagagtttatctgaaggaaatacctagccgtgttccaggcagttgcacgtggtatatgatcagtgaacgactgggctagtaacctgcttaaattaacctgtgcacctatcaatgagagagtgatgccctttagttatccagcacaatgggatgtagcaattaaaaaaaaaaacctgactatttaattcataggaaaacatagcaatcatttattcagattaaaaataaacaagatagaacaccgtacttttacttctttacgtcctctggacagatagagtaaaagtctcaggctacagcgccctgtatcttggcagaggaagggacctcaggagatgcttcaagtgggacaacttacccagtcatcgctagttaacaaagtcgccctaggacccgttcttctgacccagctgcctaccccaagacagcttattcacaaacacacagtcagtcgcacacaaaactggcattaacgctagcagtgccttatcaccagacgagttgcgcattcagagctcttaactgtgcccggcaatcggctctgctgcctgttaacccatcctatttccttgttgccttttcctctctccatcctcaaagggtctaggactctggctccaatttgccctgcaagctgcccgttccggaactcggcgagaagacgctccctacctgtaggctgggagactggcggcgacaggaagaagtgctgcctggtttgtggctggaggccccccagtcccccagctttatagccagcggaggcccgccctcttgtgtgaaaaccctgcccacctccgctctgaaaccaaagaggtatcgcctgtctctctggattttgtgctcactttgggattagagtttataggaaaacaaatctatggtccggcttggtgacgcacgcctttaatcccagtactccagagacagaggcaggtggatacctatgaattggaggtcagcctggtccacatagtgagctccaggacaaccagggctacaaaagtgagaccctgtcgtgaaaaagaaaagcaaacaaacaaacaaaactatttttaaaaaaacgaaactaaaagtgaaagtgaaactttagctttcttgtaaatcaggtttcttaaaagagccagttctgagtaaacacactgagctattttttgggtgggggaaagggatggggtgagggatgggtaaggtggggagggtgcctgtgaaggccacaggtccacataggttgtctctctttacagctccccaccttgttttttgagagagggtctctgaaccaagtttgcaactggctagaccgactctccagtgtgctccagggatccacccgcccccagggtccacccccccccccccccccccccccccccccccgccgcggccgcgttctgtctcagatagggagcttcactgcttttatcgtgagggctggggacccaaatttaaatcttccgtgcttgagcagtaagtgctttaaaaacaaaacatctcaagtcataagaactcagacttcaattttcttttcagaatccagacaccttaataaattactgtccgacatggggaagggcctaggcctggtccaggatgatgtggtagactttggggagccccttttgagggccttaccctgcctggggagtggaggggggatggctagggtcaggtgggatgttggggggggagaaaggattgacatctgaagcaagcttgttcctaatttgaactaataaaataaaaaataaaaataaataaaaaacaacactgctaaccaaaaaataaataaataaacaaataaataaataaataaataaattactgtccgatccctcgcctctttcaagtcctttctggatatgtgaaggtcttgaagtaactttacatatagagttatataacataaagagttaacaggagacaaacgacttgggttttaattctagaaagtaggtgtgtctatataataggaaacatatttttaaatcgtggatttggtcacttcctcaaagttcctcgacataatgaaaccagttgccttgcagttcaagaacttccccgtgtcctttccgaatgcttgtggatctacactgtcactgtcaggatccaggtggggaagtctattctagatgaacttgaaaaagcccatctgggaactggaaatgtgggctttttccaagataaagccatgggaactccatagggtattgtgatatcatttagacatctcaccattagaccccaaagaccttcttcattctttgcttttcctgattattcactacactacaattctaaagtagtgcgttgagtgaataccggggtgcccactggcttggatataaggaattttcacattctcagagcttctctattctttaaagacgatggagatgatactgcattaaggaaatatagagaatttgggactctcgatatcatcaataaaattggaatagactttgaagcctcagctgagctatcccctctcccaaatgccttttgaaccctcttagtgatctagttttcccaactttagtggatgactgaaaataaaacatagactttatatgtagaagtctaatttaaacatgtatatgtgtatgtacacatgcacagacaaacacatttctagctaatagttcttttctctgaaaacgatagccaaatcccaggaaatatttatgatctataaaaatatttatgatctataaaaactcactctagagactcactgtttagctgagttttcttggttaaataacaatttgagcagtgcagattaagtcatagtcccttagtagttcctatgaggtgaattatttttaaaactgaaggggcaggtgttttgttttacaaaagtattgcttaaggtctacataaatagtagaagagccaaggtaactgaagctgtccctgaagctgtccctggggattgaaaccctgctctcagcctgctgctcgaactgatttgcatatgagtaatctgaagattaccctcacctctccacctgttcctacacctcagacttatattttcccacgaagtgaagttgatcacgctccttaatgaatttggtgccctccagaagtagaaaagcaggatatgactttaattaaaaaaaaaaaaagttttatcaactcagaatatactgtgtaagccaaaatagcctaagtaagggaaaagtagccctgaaaatgatttgagttttgtgatttggacaaatgaataggaaacattcagacaagagacaaacagtggctagccaaggctgaatagtgggacacgttggtcatctttaacatcaccatttcctgttcatatcctattcatttggggggagattatttgatggtgaagactaaccatctctatggtaaggaaatgcacaaagtgaattctggagagaaccatgaatgatccgcaggagaggcctactcaatagagggcagaaccagtgtgagttgtgaaggtgttctctctcagaacaccattgtaaggcggagtctacactgaaaggttggctctcattcagtgaagggccttgagagttaaggagaaaggttggattttaattgtaatgcaaatccattgtctggcttcaggcagaggagtcatctggtatcatcctactgaaagcactctagcccgctgaagaaggcagatggaggatcctgtgttcatggaagcctagaactttgatgagaagctgttctagatcagttcaattccgacatacccgtagagaagtcaagtcacctcccacaagtcaagattcaagcaccacaggatggaacccatggcagaggccaatcttaggctaggcctccagaacttacgatggactagagacaaattaggattccaatgattctccctggtttgttagagtaactctgcagcccagctgcttgaacctctggctcagagaattttcatagagactgcatcaacaatcagttcagtgtagcacgaattctcttcggccttaatcgtaaaaacctggagtcagctatcagggggtgaaagctgaaggatcagagaagcagatgggccagccactagagttcttagagctcagaccaaaggggagatcctgtttgtacaaatcctcagattgcatctcagactgaattcccagactgccctgagctcctgtctcctccttccttgttttcctctctccgcccagccatatcactcctgtctccacctattagtgctgggattaaagacatatgatcccaagtgctgggatcacctttgtgtgtgagctctgcttctcctttagactggctcaatctcatgtagcccagggtgaccttgaattcacagagatccgtctgcctctgtctcggcagttctaggattaaaggtgtgtgccaccactgcctggtctctatagctaactagtggcttagctttgcactctgatctccaggcaagctttatttgttagatcataaacaaaatatcaccacagttagctttcagcccttctcccctttgtggaggacaggagttggggtgaaagtgccatgctctgaccataggttggtcattctgatgacaagctcaaatccaggaactcacaagagtcacttcactagagcagagaatacttctgtctcaggaaattccaaagaattagtagctatgtgggtcatatctcagaacaaaagatgaccaaacaatcttattaatcacacaattataataggtttctaggaatttaatgccagtaaatggaatggaaaccaaaagacagagagagagaaagagagagagagagagagagagagagagagagagagagagagagagagagagaaacatatgtatatatgtctcggagtaccacacaaaatagggcaggccatcttattttatttttaaaaatttatttattttatatgcatgggtgttttgtctgcacggatgtctgtgctacaaaaggatgtcaggccttctggaactggagttacagacagttgtaagctgccacatgggagctaggaatcaaaccctggtcctttagaagagcaaccagtgtccttaactggatgaactatctcttcagtgctagttttagagttcaggggctgttttctaggggaggaggaagagaccaggctgcagttctggggacaggaggctgagattcacaggttgagaacaaggtcatgtgaattgcacgggttccaggagaaggaagttagcaggccttcagtcaaatggtgctgtgacatcacagctctcagcaccccacagaggatcatctatgagcttcctgcctgccagctgtgcagagcatttacatacagctggggcagactagagtccacacccttatcattcttccccagtcaggtttatgattcttgggctgctatgaaatgcttcgactgagccacacgaagcctcatctgactcaggttacactctgaagtataaccgcccctgctcacaacagctttccttgagtctgtcatcttcagttactgcatttcagtgacaaaccttgacaagcggtagcatcatttaaaaaaaaaagactatccaattaataagctgaaatgcagcaatcacaacaattaaagtatcagttatagcaaaacacatagcatgcaaaaatgtcagactttgttgtctacacactagactacccaacttgtagaatagtcttatgaatattattttctgaagttgattctactgttgaagttgagacatacagcacatgtaacttgtcaaaactcacatgatgggagatgctataagtggcattcaaacccagatctctggctctggtgtctgctacacaacaaatacacaggtgtacagtgaaataagagtccttatctattgccatcacattgcatgtttcttcagcccactcagttaaatcctgaattattgtatgccccaacaattgtaccccttacagatatgcccaagataactacaaaactaacaatgttatttatgacattgacaaaatagaacaatccaaatgtctatcaattctgaatgaacacacaaatgtgctatatccatatacaaggcatttagccccaacaagaaatggagcaatgacccatgcttcatatttattttgtttaatttttatctcaaatttattgattgtgtgtttgtgtacaagtgcatactcatgcatggaacacttatggatgtcaaagggcaacttgcaataatgggttctttccttccaccatgtgatcccaggagtagaactgggtcccagggtggtaagcctattaacccactgactcatcccaccagcccctctgctacaacttagatgtaagtggaaaatagtgtcaaagtaaaagaagccagtaaaagtcatttcatttatttcaaacagtccagaataagcaagtctttgaaaaggcagaaaataaattaaaatggtttctatagattgactgcatgtggcatcttccataaagagaggttctatagtctgagaaaaacaagctcatgataagggcctgggggaggatcctgtgtggtttcagccacacagataatgaaaaggtcaccgggctattaaccatcaccgctctgggcagaaaacaggttacacatctctccctttgaaaatacagctctgcttgcttgacattgctggtttccctagggcttatctgtgggcaaggacctccatgcctcctaaggttgcctttctcaccttctctgcccaaagggggacttggcttcccctgctgaacattcctgttgggcatcctcccaaagtgtcaactctcacctggctttagtaaccaccctggtcctttcaagactatagatagcagaaactcccacggttgccatttatgatctgctgaatactatacgcaggcagaaaaccttgtgtgcatctaaatatattatctcattcagccctcgaagcacaataatcagataacttcagtcctactgcagacggaagtgacaaagtgagagggtcctggtgacagggtgggaatggaatcaaggcatggttcgtctgcaggcataaaccctatcagggatttgtggcccagctcccttcgaaagcttttactcttggtaacacacctgctcccaccaatttttgcaattttcccatccggctattgaactaataatgtttgaaatgaagaatctaaaatccagaaagaataccgaggactgaagctgagaacatccacacaagcctgggaggtctgtcccttgaagaggctggatgccttctctatggtgtggtgtcagccaaggttgaggcagggagctcttccaaaagaaaatagcgtgagcacacgctatttctccaaaccttgggtagctaatgggtccttgggtgtttcttcagaggttggggagcattacttactccagacagacattactggtagtagtacataatatcgaaagggcataaggtaacatggaaattcagtgatttgcttttgtttcctgtttaacttgaaactatttgatggtggcaaatagttttttttacaggctcgggattccggagacatttccatgctgcttcttctgcctttcctcaaaaatcatccgctagactacatcctgcaggttgcaatttgcggctctgacccgccccacccacctccctgctccaggcgcatgcaccggaaggacaccccaggccgcgagaactggagcccgtaaaagatccaaaggccacgctgattggctgaagcgcgtccaatccctaggctccgccaagagaagcacagtcctgccctgatcgatgaggagccctggctagaggcctccgctgtggtcaccttcccagcactgtgtcgcgtgagtgcatccggctgcagggagggagggtcggctcggctacatagccctgtacagctgcagctccagctgggcaggggaggcctgggctctgggttctgctaatgcccctgaggctgacaggtatagacaaccctgttttgtgagggagtgtgatctctcagtagcattgtcaacaagttggaaaaagtctgcagagtgcaaaggagagggaaatgggataactctaggggaaatacctacacgacagtaaactggctccacggagtcaaagtggaaacaatgacagaaaacacccccagaggctatgtgcttctgcttaagtttgctaggaaatataatttggagcattgattgagaatgattgcggtgatgtgacaagccacaaattcaggtaataaagcaggacagagatctggatgacagatgtcacaaattatttctttttccaaatcaaatcttggttcccagggtgaccagagaaagtctgtctgggatttgcaccatcaacattcccccagaaacacacctttccacagtaattataatcatgacagtgcagagctggagagttaacacctcacaaaaaaagaaaaaaagaaagaaagaaacccaaacaagcaaaaaaacaggagcaaccacatcaatatttcttttcttttctttctttctttctttctttctttttcttttttttctttttttttttttgagacagggtttctcttcgtagctttggagcttgtcctggcactcgctctggagaccaggctggcctctaattcacagagatccgcctgcctctgcctcccgagtgctgggataagagacgtgcgccaccaacgtttctgtcctccacaacactcttgtttcctctgttaccagtaagaaagtcgattcgaggccactcttatttagctgttgataacgttttgtctctgggagagagaaaattgagggtttttggaacactctaagaaaaggctgttaatggtttagttaggtatcggggagaagaagttgaaaactctgttcaagggtgaagtttcaaggtgtggcatatcatttgcaggtgtgttctctcagagggacactggtttccctctgtctttaacccatctacctgagaattactcctgatatatccaaagtccaagtccaagaggtcaaggcccagaaagaggtaagcctgaccctagctttccaaagtctttctcttctctagatgattgacatgaggattgtcccaccactgcaagggagagctcatccctcataggagtttggcaagggactcggatctgtgtgtgtgtgtgtgtgtgtgtgtgtgtgtgtgtgtgtgtgtgtgtgtgtcaatgttcgtagtaggagtaaaaattaaaccttccatccctatatgcagaagacagataagagatggtgagtagcctgagccaaagtttttcttgtgtggaatcattcatcttgtgcaagtagaagccacaaagactatcaagatggatggcagtgtttctcctgcaagctcagttggaaatgactcatttgggctgtcaatacttagataacagggtaagctgctaggtccccctcccccatgagtgtcctttgtccctgctcatagggtgctgagtgggacaatgacaaacaggaaggaacgtcataaggaatccttaggtatctgctctttcttcctagtaagtactttagcctctgcctggccctgcagctgattggtacaagtgccacgtaattccagggtgtgttctttgttggaatacacagaagtcactaaagcctggcactcagctccctctctatccctgtgaaacatccctgttcccgctcaccctactaacagggtaaccactccaactgtaccccccttcttcccccactcatttcctgagttactctaaatccaggatttcctaatggggaaagatgtggaaatagctgttgtctgggatccaaacagacattaatcctgtctgtaaagcatcaagactggctactgtggtgtgaaggtattcaacagcctattaaatcacattgaagaaagtagagaagttgtgacattctcctgagccttattgtcttctgagagaaacatcaatgactaactaaaatgttctctgtacatactcacttggatttagaacaaaattaggagttccgatccgcctacagtttacagcccccttaggtagctgttagggaagataaggtaatacgatgaaaactgaagtggggtctgatgtgggtgtggcttcagtcacagttgcaacatgcattcataaggaaacaaacttcaaattttgaattttaatcatttccaggctagtaaaagagaacagccattctgtttttagatttatcataatactcaataaattatattgagcactttaatatataaagaggcctgtacttaactgtaggctaatgtaagtgttctaagtacatttaaggtaggctaaggtaaaccatgatgttcagtatattaggtgtagtaaatgcagttttctcaatgatatttccaacttacaatgagtttattgggctgtagcttctgttggaaggagaggagaaactctacaatgtagttcttttaaaaatgcatttctgagcagaagagatggcttaatgtgtaaagtgcttaccatataaccatgaagacctgtgttggatgcccccaaaccaatgaaaatttgagcatggtagcacacatcggcaattccagtggtgagacaggagaatccctgggtggctcctggccagctaatctggtgtacacagctgagagcaacaagtggaatggactgtctcaaaaaaggtgcgaagtaaagaccaacacctgggctgtcctctgatctgcactcatgtgctgtggcacacccacctgcactcacacacatgaatggacatagacactcacacacggagttttttgttttgttttgtttttggttttggtttttttgtttttgtttttgtttttttacagtgcattagaatgaaggtgaggctggaggaggatagctaggggataacagctgcaagaaggtgtggatgagatgtgtttcaaagagggatgggaacatgggacttcaggaagaacattgatatactagccatgagacacctgatttttgttgttcttcccagacagggtttctctgtgtagctttgtagaccaggctggcctcgaactcccagagatctgcctacctctgcctcccaagtgctgggattaaaggcgtgcaccaccaccacccagctttgacacctgattcttaaacacaaggtcaagaaggacagacaaaagttcttctgaacacacgtcctcagatgcaaggtcttattgtcaactgaaccgacggtaagaagatggatagccttagatttagagttgggaagatcatgatggaacatggcactgagtatttacagaacagggagagatgggaaatcatttcaatcttcgggtcttggctaagtaaatgatgccaggctggataagtatgcctgaggttaaacagctagttagagtttacactactccctaggtcagtttctctcttttttacattgttgatagttcagagaatgtatgaggatatacagagtctgtataaattataaatttaatatatatatataatttaataattataattataaattaagttgccttgcatttttatgctttaggtcaagatggggtttatattctcaaaatctatgaatgaaaacatgaaaaaccaacaggagttcatggttacacatgctcgacttcaggtacgtgttagttaagatgttatgctcctaatcacataaaatttctggactggtgctctagatgtatgttctctttgatgcccttggccccctaattaaaatgctcttgggcaccactcccaagagatgaagtggatgacttcctagttggcgaatggcccttgcctccaatccagatacttgtttcaaaatttccacactacacataattgcttagagtatattatgaacagaatatacccttgccccaattcctagaacctgtgcatgtattaggaatatgataccttacatggaaagggactttactgtgtattcatacaaagaggtgttagcctggattatccattgggttcattgtaattcccagagcccttataaggagactgtgtgtgtgagagagagagagagagagagagagagagagagagagagagagagaaacagagagaattcaaagatgtcattctgccgccacacatagacatcttaaacacaaacctaagctgagcgacaccctactagtttttgaagatggagtgagtcagggccatggccaaaaaaggcaggcagcctcattaagttggaaaagccaaagaagcagattttcccctgccgtctccagagagacagccatgctggcctatttttgccctttaaccccagatgataatttgttaatgtggcattaggaaactgctatagactgtatacttgaccttggattatacagtagaagtttagaaaaaaaatcagagagatttctgaattgcccaatatgagttgtccaagtatctttaaatgttataaatcacagctgaatgtacaaaagttcagcccaaattgttttgctaagattttagacaaagatcatgaggcccctgtgttttttatggctcttaagggtagaaagcgatactcttgggcagtacaagtgaaaggtaaaccagcctgcctggctgaatccttattaacctgttggcatgcccgacctgtccttggtctcctggtctgtaccctagagccaacatgcccttcagagatgctccaagaaggaaacagtatactcatcatgtggaatgtatatcatatagaatgtatactagaatgcctgttgcttatattaggagttgttgtcattgctattaaaatcttttttttaaagttagggtttcatgtagctcaggctagcttcaaactggttgtgtagtctaagatggcccttgaactcttgtcctcctgcctccttctcctcagtgctagggttatgagtatgtgccactatacccagctgccattaaagatctacccaagctcctgggcagtataatgatttctttggtggaaatagagaaattgaaagaatgggcaagtttttttttttttctgtaatggggcagtgaccagaggtgactacagtacaggaatcagcccagtatctcagaaagttggagccacctgtgcatggaaagtacagaagtttccttcttaatcagtccacacaacctcaggatctgtgaagatgtggggagtttattcctcttggaagttacaggaaaccagagagtcctacatgagaggaattcatcagcgcactgaagcagcatgagtgtaatgctagtatcacttcctcatgctactccaagctcactgaggtgacaatgatgggcatgggtgtaagtgcctgctctgcactctgtggatttaggtcatgtatggggaacacttttggagtgtagggcagtctactgcttttataatgaaccatgagcaagaggaacatggaggccttggcgttgtttcattccttggagttgttcactgacacacaatcaaaagatggctccagtaaatagggcctggctttttgcatccactcaagaatgtgcagggatattcatggtccctggtagtcacctgactgaccagaggcaagagaacagctttaagtcctccccagtcaatcccagtgagtaggttttccagaagtggcattgaggtcatcaattttcagcttatctaaatcaaaggtgaacccaacctaggaacccagcccctcttaagccagcagctttctctcatctggaagaaaacagggtaaaattttccttagagcaatgactacttcacctgcatggaaccaagaaaaggctaggtaggcctaacacactgcacttcaaacatgccatgttcatttgaggagctgataggccccttccttgtacttgtcctgttttggattccccaccccacaatggagatgtcatacctgaggatcacacggcttccacagagcaaaatttatcttaaacaaatgctcagcaacaaagcaatggttgtctcgcctctctgacccttcaattactagccaaattgagtcctctcaaaattttggaatcctaaccccaacatgactgtctcactggatacagagtcttcatagaggtaattaaggtaaaataaatccttagggtgggtcttgatctgatatgtctgtgacatataagaggaaatttagtcctgtaccccaaatatgaacacagtcatttacaagccagagagatgtctccttatagcttgtcaaggaattggatgcattgatttgggatttctagatttcagaactgagacaatttttttcctattgcttaaactagccagattgtggccctcttagagtatgggcagctttagcattctaaagcatggagtacttggaagctgtatccagaagtgggtgctggtgtattgggctcaactgtaacttttctacctttctcccctgctgcccatttctataagccttcctgggaggagagtcagatctcacgaatgggggagacttggtcaccatgagctttccatacaagtaggactcatcagtttcactatactcttgtatgtgtgcatgtacacacccgacagtgtcttgaattgagtcaacctctattccttactgcaaaccttgttcacaccacatcagttgaattcaatccattttccttcaaagaatgtaacgtaagtattgcagggtccctgcatagtttcaggagactatacagtggtacagatggttggtgactgattatgaagactttttttctttaaaaaattagtttttgagaatttcatacaatgtattagggctaggaactatgtggctaagtggtagagtgtttgcctagcattcatgaggtcctaggttcagtacccagtacagcaaccaaaaagagatggggaggggggagtgggaagggaagggggaggaaagaggaaagagaggttaatttgggggatagtgagagaaactacctcttccaacctctgttacagaagatgagctatacggttaaaaatgaacatttttccacatagccactagatggcacacctaaacaactttatagtgcccaaatgtctggaaagcttgatgttactgaggtagaatggaaaccagaaacctaacacagagagagaaataaggatggtgtcagcccatgctatgaagtgtggctgtaggcaaagcagcgtggctatccatgcaaagattagtgggcagtaaacgtttatttgttatttgctgtgttcaggcaacaacatgagagaaaacaagtcaaccaaacatgagagccagcccttgacctgtttttgtgctggaaacttaaggtagtatagattctcctagtttttgatgaaattggatcttgcagatggaagttaggagctaaaatacctcggtaaacagtgtgagttcttctctcaaaggatcacacattcttgaacagggttgagatggcagccaatgagttcaacactgtgttaagagctaagaatgctatatatcaatatgtctgttaaagacagaatagtagagacttttccaaaggtcacacatttagtcagtacttgcttagtcctggctagttaatgggggtataaaaataaaaaggtgaggatgagagcttttctctctgtcctgacatgcttcaaatattttatgtaggacttttgttagaggaaaaaatgtttggatcatttttaataagcacactttgaatctattagggaaattgatgttagttttaggttcattgttaagttttggcttagactactgaatctatctattaggctagggggttgacagttatgccattggatacccaaatttattaaacacggtgtattttagttttgtcaattattagacattgtttagatgccaaatgctattaaggcataactatttttagttttatttccccaaagaaaaaacattaacttcaagttttatttgttttaaaatttttgaacaagacctcatagcttttagaactatagtggtgtgagagattatgtcattgccttctttccctccctccctccttccttccctccctcccttctgatccatgatgagttctctgtgatgaccccttactaagacaacactgcagtgtctactttgttgcaaccagtcacttagccacaacagattttcaactataggtgtatcctaggtgcctttagctggagagcattgacaatactatgttaccacataaatacacatgtgtcacttacaatgtgccaggcactgctgtaaattaatatttgtgcgtgtgtgtgtgtgtgtgtgtgtgtgtgtgtgtgtgtgtgtgtgtgtgtgtgttgggtgggtggtggtggtagtggtggtggtggtgttccttgagacaaggtggcagtagcccaagtaggcctcaaattcacaattctttttctatgttccctctcaagttctgggattacaggcatgcactaccgagcctgatgcagaacggttaacctgtactctgtgagagagagccttacaactggagtccagtgtttgagaacagtccttttgatctttgacagtaccatttttgcatagttagatagttcccctcccctttcttacatcgtgtgtttgttgtgtagtcacagaatctcatcatagcctcatcccatgttgggcatcctctaagttcctggctgatttacacaattttgacacaacggatgcactctttaccataaagtttatgcatatgacaaggacagggtgttttacatttgctgccccatcatactgtaccacaatcttgacatagctctctgcttactccctttgacagttcccagccatcaatttcagaccgatatccacttgatgtttactgggggtttaaaaaaaaagaatctatcctgtgatagttcctttaggcagtagttttcaatccaaactgtacagcagagctacttagaccacctgcaaaataaaataaacttgaactaaacttatgctgacttacctccagttaacatatggaatatcagctctaggctgttgggatggacactgggacattgaagaactccacagatgtttacactgaagaactccacagatgtttacagctgaagatactgatgctaggcttttctgtgtcttttttttttctggatgcctttttatatgaacacaaattattaattgctgtatttatatcactttgagagatacgcattattatatgagtttgggaaataagtgatctagcaaggatgggttttacacatttaatatgcatgcatacaaaggcatattatttatctttaatggaactcaaaatgcacctcaacttctactgacaaatgcaaattttggcaaggcctggtggcttagttacctcttgctctttcttctccgttcacttttccttggaacaatcttggcttggcctcagcgacctcaggtggcactggcattagaagaagcatctctggttgagggaaatgtctctgctgttgtttacaatcacctgggaaacattaggtgatttgttctgagagcattgaccatgctccgggtgagtctgccatgacctacacttttccatgctgtggacccttgagatccaactgtcttctccgaccacctctggcttattctctacccaagtgtctgctgagttctccaggccctgtggtttagtgatttctggtatgccacctgcttctaacttttagctacctcctgggaacctttccaggtgacatggggaccacgcagacacctgggtagctgagatttccccaactctctctcaggcctgctctgaaccctggtcttccctgcaaccattgtctctctactttggttctcccctctcagcatcctctttatttacaggatttctgggcacacctggggtttgcttgacattctccctataatccctgggatgtggagtggcccaagccttattctttcaccattctcccctcagttcctgccatgctagaaaaaggacatgactggaaaccaagtcagattatttttctttcatcatgagccctagctttttatctctgagctttgccggtgatatgtatgttctgtcaaggttttagaattaagaggccaagaagaaaacaggtttctctctgaagaattggactcttcaaatcacgggcttgggttttcattttggccatggctgctgcttctgtgtatttctttaaaaatccaatcatgtattgtgtcctgtatttgtgctggtcaaagccaagaaaggcactgactaaagtggcacaagacacagaaggtgacaagaaaaaccttctgttgacacctcaaagaaacaccccctcatcactgtatgatgacgacctggcatttcgatttgtagttggttgtatttggaaggcaacatgattggaaggcaaaattatttccaagcaagaactaacaacaaaggcaggcaaggtgaccccccagagctttcctcacatgaaacagagaggtatagaaacatattgaggcttgggtccacaaaaattcggtcaagacctcagcgagcagaagcagtgtctgttttgtatgcaattgaagggattgtcactaccaaagccatagtttcacggagctgttcagagaacttagtcaaaatctattgtgatttcaacaagacaaaaatgcatcagaacacatgaagaaggaaaagcagattgtaatactgttccaagatgaaaggtgagtaaccccactttgtcttttgtgcttagctggaaaggcagctgaccatgcagaacgagatgagggaaagacaaatggctatgcagatcgcctggtctcgggaattcctcaaatattttggaactttttttggcattgccaccatctctttagcagctgggtatgttaacaatttacttgaaggtttttctgaaataatgcagtctttgccgtgatcatagcgccaccgttaagttggctgaggtaggactttgaacccaagagtattcgtgtaaacaaagaaaccccccctagtttaactcctctgtagagcaagggtagtagcagttcattccattccttctgtctttttctctagtctacaagttaaagagggctcacttgacaccaagatggatggcctctatgcttatccctggaggtcctgaatggtagccctatgtccttgtgtgctttaaatggaacaatcaaagccttgaagtctaagaaagattagcaagtcatagcaagtccatgtccacccctactccatccccaccccggaagaaccaaagaatctggtgaagtatgctgggcaaggaaattcaatttctatagaagaataaataacttatgaaatggaatacattcttccagaaagtaagtgctttttcttacaaggacaagaaatgcatttgctagttattattgacattcatttttctgtttctgaaacagagcaataaagcaaaagaagccagcctttctctttcctatcgttccactcagctttatcttcacctaccagtatgacctaggctatggaacacttctacaaagaatgaaaagtaagtctccctaaccttgtttcctaactaatcttctgattcaagatctccactcaggcctgggacatggctcagtcagtaaggtacttgctttgcaagcatgagggtccgagtggtacatgtttgtaatctcaataccagggaggcagagacaggcaggtctcctcagctccctggctagccagcctagcctacttggcacactccaggctggtctgagatactgtctcaaaaacaaaaacaaagagtagataatgtctggggacactggaggttaacctctggcctctgcatgtacttgtacacacatgaacatacatgcacatgtattctctccttataaatctttgacttatttgacttatgtagattctggtaggatcattttcctaagattcctatgactaacatctctgctccctccagcagaggggcatggagttagctcttaatagcgaattaagaaccgacttgaacaccgggcattggtggcacacacctttaatcccagcactcggaaggcagaggcaggcagatctctatgagttcgaggccagcctggtctacagagtgagttccaggacaggttccaaagcaatacagagaaactctgtctcaaaaacaaacaaacaaacaagcaaaaaactgacttgataaatgtttagagattttgcctggtggatgtgaggcacagttgtttattaaaattaaattaaataggaatatacagacttagaattaaattataatagatactaaatttattgtattaaataaaagatatttaaaacaaaggcattaagcattcagaacccatctgtttctaattatttctctattctatatgactatacattacttgtatcatagtatctgcatttttacaaatgcagaagcagcataaagatgcaacaaagtgcagccacaacttcagcctcagcggcatcccattggtggcttgaggttggtcatgatgggagcattttacgtcatggaaactgacaaacatcaaatcaaggctttaccttatattctgttgatcacctagaccagggattggaaatgctgaattttaaacctttgggaaagaattctaataattcctataagtattcttcatttttgcagacagcttacttatttttagtgtaaatttgcaattgtttgtatgtgtgtgtgttgtatattggtcaaatccaggtagttatacctatctcctccatgcatttatctttttttttcattctgagacacagtctccctgtggggctcaggctggccttgaactcatgatcctcttgtccttccgcctgaatgctaaattatatgcttgtaccaccacacccagctgcagctgggtttccagagtctatcatggtgtttctccaagtggtgtattccttctcctgagggaaatagacaaggtgcttacctctgagatgtcaggccatggatacagattgtgacacagtgtgtcaccagaacagcaatcaagccctctcataacaaaatgctgatgacccctctgttgccttacacacctctgcattttatttaaggtgaagctgaagacatattagaaacagaaaagactaagttggagctgccaaagggaatgatcacctttgaaagccttgaaaaagcccgaagggagcagagtaaattcttcacagacaaatgaagtcatgtgttcaaagcacatggttcgactcaaagcacagaaaggttggcttgaatcacggtgtttacagttttttaaatgatcaaaattttgatacaatgcattttttattttagaatattaaatttcaaaatgaatttgttggactattttagaataaaatttctaccactcaaccaaatcatgacagtattctaaatggcattcaaatttcctgtgtgtgtgttttacaattatccaagtgcaaaattaaataaattgtattgttctgaatttgacaccaatgtcctgttgcttgaggttttatcattcagactttctactcgctaacaactctcacgggcatcttttagagtgtcctgtcccacaaaaaagaacatggtggccaagggcgaccagtgtataatgaattacaacgttcagtgttcggaagaggaggaagagatgatgaagttgagaggtataaatggaattccataaggaatgtgaggagggaaatggggtgatatcttatttcattgtatacatagatgataatctcaaacaataggttagataaatgaacaaataagcaaataaatacatagaaagaagctatagaagaaagagatagagattttgtctcatttcatctgatggattcatgcgtgatggaataataccataatatcaactactctggaggctgaggcaggaggttcttaactttgaggccaggctgagcagcatagcaagactccatgtctctctctgtctctctctgtctctctgtctgtctctctctctctctccctctccctctccctccctctccctctccctgtccttctccctgccccccccctctctctctctctctctctctcacacacacacacacacacacacctgcataatagtggtgtgctatgggtgcccaaaatggttcatcaagagttttaaattaagaaatctttttgctgtgcaagctttgctgatgtcaccgttcaccagatgtagtttaaggccccttcaaggtggtgctgaagaccttccagaggctttagctgctgggcaatctagtcaggcccttggtcctctttgactgtgagacacttcctttagctccgtgtcttgatgtagacgctgagttcattgataactcacattcatacatctgcttctacaatggtctttcccaagcgtatagagaggcaaaacccaaggcgatctactaaacaaacctctcttaagcacggctatatcaattggcctcagacctgctgactattcagaatttctcctcttcctattacatcatcttttcactgaattgacaaacacttcatctgtcactcttgcctatcttagtcatttacattaattacatatttagtacatcttaattataccttttattaagtttccaagtactgaaacagcagtgctctcctcagcttattatcgaggcttcatggccagagacaactctcttctcgtagttgtcgtcgtcgtcctcctcctcttttttttttttttttttttttttttttttttacagggtttctctgtgtagctctggctgttctggaactcactctatagaccaggctggcctcgaactcacagagatccacctacctctgcctccctgagtgatgagattaaaggtgtgcactatcactgcccaatggtggaagaactcttaccacttgggtttccccttcccaagacatgctggcagacccaaagcaaagctacatatatatgacaagtctccttcagggttggaggacatcagtgagcatccagtagtctcctgcggcaaaaagactttcaataattttgtgataattaaaacttagtttgtgatattctaatacttaagcattattgctaaagatttatttatttgtattttatgtgaatgggtatttttgcttgcccatgtatctgtacactctatgtgtgcagtccctcagaggccagaagagggcatcagatcccctggaacaggaactacaaagggttgttagtggccacgtgggtgctggcttctctgaaagaacagccaatgctcttaatcaacgagccacctctttaacccccctcaagcattttgaatattttcgagtcaggttgcagggagagcactgtgcttttccacaactttcagaaattttacatctaaaaagagcagtttctactaaacactggtgttcagtattcatggcagtatccttttcaatacagcatgttggctgttatctgaatagcaaccaaatcaatttttaaagccagtgactgactgggaatgtagctcactgatagagtccctacctaattcgtatgagcccagggctctatccttagaaccacagatgaaaaccccaaagtcagaaataatatgttatttaaaaaagtcaccttggccatgccttacagtcacagaaattgtatgaaaatgggtcaaaagtgcatgggttagcccatcactcagagctgcacgctgaattcaagaatagacagggctacatgagaccctgtctcgagaacaacaaaaggtatatgaactagaagagaacgggaatggacagattcagattgtgaaaactgggtggggcatgaagttcagtggtagagtgcttggctagcgtgtatgaagtccaggctcaatccctagattaaaggcataaacacacacacacacacacacacacacacacacacacacacacacacacacacacacacacacacacgggggtggggtgggatggggggagacagagacagagagacagaaacagtgaaacatggacagacacagaatcaggcatgtaagtgtatacactcacacaaatgtcaaatttcaaaaactctgcaaccaatttgttgtaaatataagtcatctgaaattgaggtgttacatagagttcaacaattccaatatatgaatgtccgaacatgatattctagagacactagccagaacctagctttttattgttttctgttctgccattccaagaaagaaataggctcctgctgagaaatcattatcaatacagtctgttgttactcaaacactctggtgtttcttgcccttggtgtgtctattctgtaaaaggattggaaatgttcccttaggtttggccttgtgggcacccacaggaaacttcaggaagacagtgcatggtgccaaatggcagaaaagactggcagttcttcaaagtggactgttgggtatcgccactgatttttttaatgcctacttggtcagtctcacttgggaagactagagcagtacttgggttatatacaggcaggacacaagacccagaaaggggtgagaagttatatccagagaatctgaaagttctaaaaatcaagaagagggccaaggaagagcagtctttgtgaggtgaggggcctgacttgaatgcatccaccagtagacaggccatacatgactgacagggttaagttactgcaaagaccggtgtcagtagagggatcctctcacaggccagttcggtttaatatggtcaatgaagagtaggtttttgtaggggacagtaaaccacgcctgttagaggctggctacaggtatgcctgaccatacctgttaaggcgcggtcaaggtgagatcaggatgacgtgggatgagctcttaaggggctgcaagcacattggaggccccttctctctggcctcgctgccttgctgccctgggcacactctggcttgcatttggctggtgtttatctgaataaagatatcttttttttttattagttcaaattaggaacaagcttgcttcacatgtcaatcccttctccctctccctcccctccccccaacatcccacctgcccctagtcatcccccctccactccccaggcagggtaaggccctcaaaaggagctccccaaagtctaccatacggactatggatcggttctcataacaggttttcttctgaccaaaacatacttgtagtcctactgctgtgactctgttgttgtaagcatagaacccacccaaatagtagaactgttctttagaaaatgtgaaggtcttcatattttccacaagtgtaagtcatcatctaaggttaaagaagaacttcaaaaatgaattctattatacattttctagtgaattctggtactgaaattaaacattgaatgctgccggagtcttagtcacaaacttggtgctgtctgagtcacacattcactccttttctatttgaaagcatagggcagggatgacttcagttagataggctttttctaagctcatttggtctgcattactttaaattgcttcaattactattcactacctaattttcattcttctctgtcattttttttgttctctttccttaatgagagatccatgctggcaaattctcctttaaatgaaaaagtccatgcattgtgattccacttatgaaacctaaggtgacactaacctcaggtgatcataacagcattttcctggaaagctgaggatagactacaaagggttatgagggaaaacagaactggctgtgtcattataaagatatggcatacgctgtcatccccatttgtcaaaactgcttgcataatatttgtgcatttcaaggtatattatctaaaattataataactcttgccttaattttcattgtcataatttaatgagtaggggaactacataaagtaataatagtgtatgtgtgtatgtgtgtatgtatgtacacatgtataaatgtatgcatgtatgcagagagagagagaattatagatataagtgaaataaaaatggtagactttcaaatagtcattgaaacctgtaagtgggtattctacatatgacacatatattccaaatgatacatattttcatctttaaaaactaagatatttcctaaatctgtgagatcagagaacttgttttttctggacttttgaaactatatgcattagaaatcttagataacaaaagtatgatgtaaagtggaaaaaaatctaatatttagaagaatcaattcaaagtggtagaaaattcctgaaacacaacctgggaagaggtgacattatcaagatgatgaagtaggaggtagaagccttcattctcccccccccaacacacacaaacaatcaagcaaacaaacaaaaacccagttatttataaaaacaaaataactttgagtgggcccatgaaaaatctgcaatacagtagagcagagttaaatggagtgcctatgtagacaggcctgttgattcaagtctgaggcaccagtatgtcgagtaacaaaaggaaaggctggagaccctgtagtatcagctgtgtacagtacagtggaatgactgcattcccaagaggctttgctcctcaaaggatgccagtatcctttgccacagagcagtcaacagccttccttcctggaaatcacagagagggagacctgatgcatattccccatcacctctcccaggcttcggagaccccgacacaccactccagaaatgcccacattctagatgtatgctcctcggctgcgttgccttgctcacatctcagacaccagactcattactatacagaactaacctgtacttggacaccaaagtttctctgggcatacctatgctctgggtaccagcctttctacactgaccctgtagccactgagttatgggtgttcatccttgtcttcattcttggctcctcagtgggcgcaccaccagtacctgtatatcatacaccattattgacagtcccagaccccagagctgtagtcctgtcatggctctatggacattccaagatgccattgtccctagcaaatggagtacaagccagatacagtgccaagagggctgccttcagccataacttcttcagtggaagataaattgggaggatgttggggacattgccactgaagactccaacagctactacaatgactgtggacatcctcagcctaggctgctgaggatctcagcaaggtggccaacactgaacttaccatctgtcatatgatagaagaacctacataagaagcaaggaagttgaattacatttcagaacaaacagacctccattcctctctcagctgtggaaaacacattcctaacaactgttcaaggaatgttctgcataatggatcatgtgttgtcacaaaccacatcttaaatttttttcagacactttttctgaccatcatagtttgaaactaaaaaataataagatgaatagtggaaaattaacaaacttgtagaaattaaacaatatgttcccgactgacaattgtatctgaaaagaaatttttaaaaatgtgaaaaattaaaatagatatacaatggtctaaatttatagatgtggcaaagtgtttataagagagatgtttattacaatagaagtctcgcagaggaccacagttaggttcccagtacccatgtaaactgcctgaaactccagttctggagatctgatgccttcctctgacttccctatacacctgcactcatgcacacatacctccctccagacacatatacacatagttaaaagtaaaataaatcttaaaaaagagagactactgtgaataattaacaccgacaaactgtacagccttgaaggaacaggtagattcctaagtacctacaacctgtaaacacttaatcatgaagaaacagaaaacttgaactggccaatgatgagtaaggggaccgaattagcacaccacatttgtagtataaaagacgaagcacaccgtcatttcaatagatacaggaacagcattcgatgaatttcaacgtccatccatgagaattcctaacaaatcaagcatataaggaatgtacctcaggacattcaagtccatattcaacaagcccatagctaacatagctattctggctacttatcaccgagaccttatacctgacaagaagcaatgtgagggagggagattgtattggttcaaggtctgatagggtacagcccatcatggcggggaaggcacggcagctattaccgaggtgggatcatgtggctgggcacctcaaccttggtgtttcaattggaatctctggaaggggagccagcctgtaactcataaggtctgcctttatggccctacatctgccagcagagctccatgtccaaaggtcctccatccaatagggtgggagggatgcccagtgtggagcttgccagcctgttgtagggctctctggtgggtggaaaactcaagccccagtgaactgctgcagtagagcaaccacaaaagtcacagaatccctgatgcagggaactccggattttgatgaccagaacactgagtgcaaacaagatgaaaattgcagttggaaacttcagatatcactctaagaaccagaagtactggcttcaaatcaaaaccataatgcagcattttagttaggaaaagctctagtctgggactggagagatggctcagtggttaagagtgctgactgctcttccaggtgacactggtccaataccagcacccacatggcagctcacgactgtctgcaattccagttccaggggacctgacacccatggcaaacaccaatgcacataaaataaatacaaaatttaaaacccataattttaaaaaaaggaaagaatggctccatacaaaagaaaaaaagaaaagaaggataccggtggggagtacagctgcaggaaccctaatccccagcagtaagggatgcaacgtatttggaatacatgtgggcagttttctcttgggaagggatatgggaaatgtttcaggaattttagaataagttaggaagtctaaagtaagacctgtacttttgtcttagggtttctattgctttgatgagataccatgaccacagcaactcttaggaaagcatttaatgaggtggcagcttacagtttcagaggtttaatccattaccatcatggtgggacatgacagtgtgcaggcagacacggtgctggaactgagagtcctacatcttgataggcaggcaacagggagtagactgagacactaggcatagcttgagcatatatgagacctcaagcctgcctccacagtggcacacttcctccaataagaccatacggcctaatagtgccactccctttgggactattttctttcaaattgcctcagccctgtagaaaaaaaagaggaggagatgggcaggctgtaggagtaggctgtttgaatcatcttctaatcactttgcttgagagggagggtttctcctcttagggttatgcaggtgaccaaacatacctaccagtagtgggcagataagaggaatagtagatattaagcatatagttacgcgattggaacatgggccttgtatgctgtactgggtcacacaggcatagcaactgtgaaaagactgtaaaagcctgggctatctgtgtgggacaggcttttgtagtatcaagagggtgaaatggtttccatgagagtatgggattggcttatttagtgatccagcaagctggcagaggatcgaaactcactactctgggacaagcaagaatggtgctgagttccctccacaaggaggggtgtttagctggtaaacttcgtctgtggcagtagagagggagagaagcttgtaggcaggctacttgaggcccttccagattcataaggcagcacatggtattgctggcctttgattttaggccttagacctcagttgacccttaatgacgacatcaatttaagctttagtaatgactgatactcacaggaaaacaaaacaacacaaacaaaaacccaactgccttaccaggaagctaaatggcatttgatacaaggaaggacaggacagcaaagtgttataataaacatttctggggtttacaaacttgtggacttcaattgactccatttgttcaaggacagccaagagaaaacatctgtggtttccaggattcttggtataaattatgtttttatttaagtgaagtgctgttgcccttgcccaatattgttgacccatgcacagtattgtttagttctttggaaataaaacactcccacttctggggctaatcaattattcaacttgtgtcattaaggctaacactcatgaggtgtatggttgcagttttgaaggttatggttctcagtcagtggtgcttggtactgcatcagtggttctcagtatgacccatgagagttttatttggtgagatttgagaagaattatgggaatgatgtgatcagaactatagtatatagtttggggtcctattacctggtgcttactatctttttttttttcctttttggtttttcaagacagggtttgtctatgtaaccatggctgtcacagaactcacactcactctgtagaccaggctggccttgaactcagagattctcctgcttctgcctcctgagcctgggattaaggtgtgccaccaccagcagaatcacctgccaccttccgatagacctatttcatttctagcaatggaacttcaaaaaattaagtatgaggtccaggttctgtgacagggaagggagtgggttggggtttgtgatgttccacgaatgtttgtggaaatggctgaattacatagccagaaatcaaattgtgccacagtgtcaatacccagtgtaacatcaaattcagaaactgtaataaaagaatattttagtagtcaactacttaaaaaaaaaaaaacaggctggagagatggctcagtggctaagaataattgttcttgcagaggatcctcattccagtgccagcaccaagtgacagctcacagccattcttgactctagttctagaaggattcaaaccatcttctcatctgagtaggcaccaggcatgtagacatacatttgagcaaaatatccatacacataaaataatataattaaactgaaaacaaaacaaaacaaaacaaccaaaaatcccacttagagtctgtgcagtgaggactggagccacagatgtggctggggactgccagacttcccttgtgcagggactaatacttgagttgaacaataagtgatggggaaaaaggtatttctcttaatttaaaaatttccaataattttccagcaagaaacttttggagacaagtttccagttacttttcattcttgataacacaggacttagccaaaggctaagttaaatggcagcacccacacctgggaactggagagttagagctgggtttttactaagaatgcttggagatttagagctggatttttacccagaattcttgtaaatgcatgtctttctcttattccttgccaccaagtctcaacaaaatgatagaatacaaggcaacaaacacaagtgcagtagggcatggatcatcactgggcttaagttcagactactgatgacagagtggagagaacaggaagaactgaccagaaaatgcaaagcccagggaagttattagcaggcagctttaaaagagtgggtagctcatctttaaaaaaactgagttcctcttttcccttagagctactggccaagcctgaggctcctgatgggatatcatggaggtcaggagctggttcaggaagaaggccttgagtacaggaactcagttatcagctgtggtaaatcataggccattgaccacctgacatagagacctgtgctctatgaactggtgatgtcagaagagccaggacagtgggacagagatgacagtcagttacagaagcagccctgcagactcatctctgcccatctcctccttgcctttgtcagaaaaagtgtattctcagtttaatgcttttattaaaaaatgtatttggggcaagagcaagatggttgattaaagtcacctactacttggctgctgatcacacaggaaaaagtagaataacaaaggaatagctatgttttgaagagagtggcactgagcacaggaaaggagaaaaaggaatcctgggagacacaaatattagagactgaaatagagtgtgggaatctgtatctcagttttcgtggtctgggagacaccacacaaagggagaaagggtgactggggaagtccagtagatggagacttctgacacagcctgtactggctctgggctgacagcatatagtggctcatgtaaacaccataattggctcaagatacatagttaacccagccacctctaaacacagcatgggtctatgcttcccaaaactgctgccgtgcacagcccctactcaactgagctgccctaggtgggttggctatgctccacactttcagtgacaccattcccattgtcagagggagtcccacataaatgcctcagccccacagtgttaggaaccacactcactgaaccaatggggtgtctcttcactcatcatgaccctggaggcagatagggtctccagctctagtaaccacacacatcatacatatccataggcatcagtcacagctgaagctatagagcatccataccacagggctcaacaggaacaaaaggcaaactgtcttaccaaactgataccacaaaagggctataaaagccacatgtggttcatcactgtgtaaatatcagcttagggacacaaaaatatgaaaaaacacatgatgcctctaaaggaacacacaaacaacagacttccacacaagggtattatattaacaaaatacctcataaagaatcccaaatcaaagaatgagtgcaggaaagtgaccagcactaaaggcaacacaaggagaacaaagttaggaaaacaaattatgtgatgaacctaacaattaaggtagtgcttgatatcttggaaaagaaggaaaaagaaaacttagacatgaagagcttgataagtcacctgaaaatgaggctcaaaggttaaatacagacttgacaggggatgttcttctgtatatatgtttctcttattggttgatgaataaaactcagtttggccagtagtgcagctggggctaggatatgagaaggatgctggggattgaggcagagagctgacatgaggagatgccatgtagctgacaagggagtaacaggtctaagcattctctggtgagccaagaccacatggaaatacatagatttatagaaatgagttaataattaagacagagttagccaataataagccctagctatcaggcaacaagttagtaattaatataagtctttgtgtgtttgtttggggcaaatcatccatgggaccaagctataaagaaatactagccacacagggtagctcaaaaagtgaagaactctgagcctgaagtcatatctttaaatatctcaggcagaaaagaaagaggaggaaggagctggagagatggctcactggtgaagagcactggctcttcttccaaggacctaagatcaatttgtagttcacacatgtctgtacctccagttccaggacatctaataccctcacccaaatagaattgcagacaaacaccaaacgcttgcaaaataaaaataaataaaataaaaaaagaaatagaaggaaaagaatatagtgcctctgagatattgttaaggagtaagtacatttgagcaccagaagccaaagaaatagaaaaaaacaattttaaaaacaaagaaacaaacaaaatccagtaaatgattagttgcaaatagaaaattccctaatctcaaaggtacacatacatgtatagaagccacatggatccccaagtagaatggtaagaataaccttctgaggcatatttagtcacactgttaaaaatacaaggtaatttcagctctgggggacaagacatgttcttctggactcctcaggcacctgtattcatacacacaggcacacatgaatgcatgcatatacacactcaggcatgttcccacacacaaacttgcacatgagtgcatgaacacacacacacacacacacacacacacacacacacacacacacacacacacacacacgttttaaaaaacccctctaaatctttaaagaagaaaaaactttaaaacctaagtgaggaaagtaaaaagtcccattcaaggctcccatgggtccaacagctgctttacaaagagaagtcttcagcatgggaaggtaagggaatgattgattccaaattatgaaagaaaatacttaacaaccaggaaaattgttcttgacaaagctgccattcagaaatgaagaaaaaagaaatgaaaaccacgaagaagcaaaatcagggaaaccattaccactagtgcaagtttcaccagacacttagccaagtcctaaaccacaaatgaaagaacaaaagctaccaccatgagaatactgaaagaataaggctcaattgaaacacaaaagagaagtagataaagtccactataacaatatattaaaccaaagcaagtggaataaaatggaagacatcaatcaagaaaattagcaaaataacagtttaagtgtttagccattaataaagataaatgtaaccgcactagatcccaaagggtaaaaaatacactgacttcctcaaaggaggaaaaaaaagagatggtatttctttttctgtacctccgttatttcacttaacacaatgccttccaattctatccactgctacaaagaaataggatttcattctcctggtggctgaataatattccattgtgtatctttactatattgggtcccatcttgactattgtgaactgtgtacatggggtgcacaggaatctctctggtatggtaattctgggatatacatcacaacgggagttagcttttcttccttcccaaatgtcaatgtaacaagacttaaaaattagtagtatttttaatataccatcctatttttagttgcttccatactatttcttaccaaacagtgtataaaaatgtaaaaaataaatcctacatgtgtatataggaaacaaaagattgggaagggagtagtgatggacaaaaggagactagatttatctagtacatggtttacatatgaacctgtgttgtcacactgacacacattaatacataacgttaatgtgttatcaaaaatgaaaaggaaaattattttcttaaaaaactaatgagatatagcctgaatgggtttaaaaactgaagatccaatgatcttagacatatataactcatccaatctaacagtattctgcccacaggaaattctgtttaccagtacagacacactgaggaggcagaagaagagattccacactaatgaaaaccagtagcttgttcttcatactggatgaatattgttgccttgttgaatgtgtaattagtaaataatttccaccatactgtacgctacctctttactgtggtggctgggtttttgttttgggttgtatggagctttttaatatcatatgaccacagtttttaatattgggattacatgctgtgctgttgggagtcattttcacaaagtgtctggtataatgattttgaagtgtttaccctatgttttcctcttgcagtttcacagtttcaagtttcaaagtctttgaagaattttgaattaaaataaaatacagcttggcagaatctatttcattctttgtgtggaaatccagatttctcagtgttcattgttaaagtggttatcttttctccataatatatttctggtacttttgccaaaaattaagtggctataaatgtgtagcttcttttggggtctggtatactattccatttgtgtatgtatctgttttagggttgtttttttgttgtttgtttgtttgtttgtttgtttggttgacagaaacagagtagcatgggtttcttgtaaggaagaatcttaaggaggacagcatgggagagatgcatatcaagaacagcaattcaatgacttctgaccaagattgctgtggctaccaaagctatctttcaaaagagatggataaatgggacaatctttagtatctcttaggtataataagatggtgtcatcagcaagtagggatacttggatttcattcctttatatgtgtatctcttgcatttctttttctagttgctctaagaattttagcaccatattccagtcaatagagagaaaccttgctttgtttcataattttgggcacattttctcagtttttttcccatttggcataatattgcccaaagatgtgttaggttgatacatgttcattttattcctagtatctacagggtatttatcacaaaagggatgctgaactttgtagaaggctttttctatgtcaactgagatggtcttgtggtttctgcccttggagccatttttgtgttgaatgacacatatttactcatgtatgttgaaccaagctcttcttttgactcactgagtggcttgaatgggcatgggtaagttaattcctgtatcatggacaacttcaaccctgccgaaactgacatctctcagggaggggtaagacctcataagcgctctcaacccaatccctgatgcttgacggaacgctgaagggcacaaattgccaggtccatgtccaagagaaagctttgcagagcactcttccccatgctttaaagcttttcagtttttgccacttcactcttccccgacatcccgtgggccttgatggaggtgatatagatgtcgaggttaggcctaagaactagataatcaatcacttattcgctctactttgagtctttatgagcctctgcattgataactgccttgttcatcacttccaatggaattttattatatggaagtagtttcatcaacttcagaatgccagccacagaaaggcatgtaagtaatatagtcggcatgtccacctgtaatttctttctgacttctgactctctcttctccattttctgttcccctggtttttgccacagttctagtggcatccatgaatactgtaaattcaactgtcagtctgagttattaaagatgatataatatagattaggataatctcatcactttccttgagaaataaccaatgtccaaactacactgggccatatgttctactcagaactctttaggggagcgctgtgagagaagagcatacccatcatttatagatggagacttaaagatgaaaatatatgtaccagcccacctgatttacatgatgctctgtgctttctacaccagttctggctagttctttgttaacatgacacaagctagagtcattggagacgagggacccccaactgaggaaatgcttccataggattgggctgaaggcaggcttgttgggcattttcttaatcactgattgatggggagggtccagcccaatgtgggtggagccacctctgtgttggtggtcataggttctaagaaggcaggctgatcaagccatgggagcaagccagctgcttttctccatggcctctgcatctcctgcctccaggttcctgccctgtttgactttcatccctacatccttcagtgatgaacagtgatgtggaaacataggccaaataagcacctttccccccaagttgctttggttatgtatggtgtttcatcacagcaatagtaaccctattgtcttgctttgtattttcagatgccaccccttacatactgacatgtggtcaatttagcttctttgtttgtttactcccatcctaccagaatgtgttctccagcaggtaagaatcttcatctaatttgtttcctgtgatgtcttccttgccttgaacagtgtctggaaaacagtaggttcttaacaatgctttagtgtaatagataaaactaatagtattatcaacaaataatcaattaactactagtaagttcatagtatttggtaaattaatgaataagtcaataaaggagaatgtatgagttactttgtactgtttccctacttctgacatcattttagtttattattacactgtttagtgtttaaaatctttttgttaaaagctcattagtgaatggagccatcttttgttcatatttattacccagtccatatcattagcacagttgagtggatttattaaaatatattaaataaataaataaatatttatatgcattttattttactattactctttaattgtacgtgtatggctattgtgcctgcatgtatgtctgtgtcacttgcgtgtgtggtgcctgcagaggccagaagacggcttaagatttcctaagagggcattgtattaagctgaactattatatatggttatgtggtaagattctatagccattttaaagggatattattcaaaaacaataagattcaaagggcaaaaggagttttgcataaatgtattattaacagagctacaataacgcagagaacatttctttcacgtcaaatgacaaatccatatgtaaacatccatttctcagattgccggaaatgatcaagaggaacagaaagcggcatcgagcaggtggcacgaatgcgtgtgaacgctgggcgagttgtacaccctcagctccagatcagcagatgctagcaagagatcttcttgagcaaccccggaagcagcactgatgactcatgtaaacaccggtgtacctctttttccgggaaagagtgtccaagtgtaaggatttcagctctggaggactgctgtctttggcttcaccttgtgtagcaccgaaactttccttaaagtcttccaagctaccaactgaatcgctcgatacaggcgcatattgttgctgctcaggcagagagggatgcccctcagacagtgctgcctggggctcctctgatgaatttggaaggcgtttaggcatcgtttcaaaaggctgtgcgtcttccttgatgaaggaggttatagcttctgttacgtttaaaagaaagtgggtggggagagaacagtcatgtcaaggaacattcaggaaactgcagacagttgaatagaaaaaaaaaaaaaaaaacaacctatttttcccggatataattaaacactgaaacagaatcagcaggtattgactatctaaatggttgttcttgccaaggttctgtttattccacatggccttccaacatctttatttatttatttatttatttatttatttatttatttattatgtatttattttggtttttcgagacagggtttctctgtgtagctttggagcctttcctggcactctgtagatcaggctggcctcgaactcacagagaccctctgcctcctgagcaccggccaacatctttcttaagcacttctttcttgctttttcatcacaataattttcaccctttgataatgaactcttatttttctgaaatcatgttggccattgaaaatactagttttcatgttttctagtgctacatgcctttaatcccagaacttgggggacagaggcaggtagatctcaatgaagtaagtcaaggccagccagagtgagtttcaagacagccaggactgtgtggagagaccttgtctcaaaacaaagcaaaacagaacaaaacaaaaccccagtcatttacatgctttctagcctgagtaattttcttcattgcttttgagttgtgaaagtaagtaatccttgaaaactattttcaaaatttgaagattgtaagtggcccgtaatatcaagttactgcttcaggataaagtttaagagacagaatttcacagcagttcagctctgaccagaggggcaagtatgtctctaagcacttccatggcaatctttcttccccagagtgttggctccaatcaatgatattgcatattgcagagagacccagctttaaacagtacttctgatccttcctaatgctgtgcctgaccctttgatacagttcctcattctgtggtgacccccaaccataaaattattttcattgctacttcataactgtaattttgctactgctgagaatcgttatgtaaatacctgatatgcaggctatgtgacccctgcccccaggggtctagacccacacgttgagaaccggtggctaaaagcacggtaatcccaagccatgtgcttcccaaagagaacggtgtctcccagggtgtgccagagtgttaagtgtggggtttgcccagtgctgtgggaacccctttagaaacacctggcacctgccttcttcatacatatctatagttcacaattcactaactgttccatgtggcaatgccagttaggagtttaaaaaaatattctgccaaaaataaagagttccctcactcccccccccaaaaaaaacccttacagtaacacaaagtcttccctggcctcacttattccaaatgcacaaattgagttttagcaaacaaaaaaaactggaaatgttggttatgtttcagttttagtacaaaggctcagttcttgctgctgctctttagcttagcagtaagtcattcctctggaagcaataaaaccaaagaatctaagagatacaacgtaagggtgtaagggagatgcctgtttagccatggaggcttaccctgtagagaaagccaaaaccttcacctatacagaggtgcctgggacaaagcttcctgacaatcctgttgtttactgaggattgaagtatatcaatgatacacttcagcagttggaatttggcagagggaaaggaatttatcttctcactgctcccggctcattcattgtctaaactgggcatggcaggtgacattctgtaccattttatgtatatcagaagctttaactcttttttgcagtaagactctctaaccttaactcactttattggtccctccttgctctaaaattttgtccagatagggctttcttggcggcaaagcaaagttgatgatcactctctatgtatttagagtaaacaagcaaaggccagttatagtttgggtcagacttaacttacagggttttgcgccttgaaattctttatttaaaatatttttgacttacttggaaatccatagttttaatttatagatactaaactcaaatattacattttaatctacttgagctcacacagatacctgctttttaatcgttggattatagcaccaatgcgtttttggccatggtagtttaaaagctagcctcccttcttactgatccccgtcaggtttctctagggtttctcctgcatttccctaccctttcgattgaactgcaagacccaacacaaaaagatgtaggacaaggcttgctgggtgacatgcctcaaataccgggagcaggggttttcctgggcacaccccacatcccagatttggatcaagtgctacctagcaagaaattgatggcagcggctgcacgcccacctccctctgatgggttctcattgaaactcttgaacccaagcaaggtataaagaccaaacttgtggctggggatcacaaaccacggaggactgtggctttccaattggtgggcagccggtgggaagcacagaatgcagggaagagggcgctggctcacctggctcacctgtcattcgcctatgtcgcctagctggctcctccacgccaatggccttcgagcagacatcgatagccgcacggacatattcccgaccgcacacatggatgacttcgtccagccactccttcgtgacccgcgccctgcaaggctggctcagcagcagccagagccccaggagctggaacacgaatctgcaggacatcttggtggggcagcttctgggagactcagccagtgacaggactgggctaggctgctttcctagtgctcagcctgccttttatatcccttgggtgctctttgagcctggatgtaaagttccagctccaccccctatccgcccacccacagtattgcctcttgggtcttgatcacctttcccacttttccgtcatctggtcacccttatgaccttgtccctttcacagcattttcccctctgttcttgccctcaaatcattttgtaggccaaagttactctgggcttgaggccatttcttgatatcagaataaggcatgcccaccgcactaactcaaagcagcagtaaagtcgatacctccttcttacaaacaaaggcttgccagtgcaagaatttgccctgacaccttccaagcccagtaaggatatagttgcagcctctggtaggtcagtctggaacaaacagagctggagcagggtaaactgctggtcagacagggaaactaactccttttacctaaagcatggtagaaagcattggaacttgttttttgttttcttttactgaggtgaagggggctgcttttatgatttctttccagtaaattcctttgttgatgttttaaaatgctggtgagttttgtatgttggttttaggcgccagagtggagattctgctagccgtaatggagattttgacatttgacttcttctctccctctttgtcttctctgcacttttattgtcgttcatcctaacatctttaggactatattgaacgagaatggtgggaaccaatgtccttgtcttttttaaaataacagaggaaatgctttcagcttccctgtattcaatatgatgcaggctgtggcttcttctatactcttgatcatgttagggatgagcctccaataagttttaaatcatgaagcaatgctgaattttagccaatgttctctacttctattgagatgatttttacgattttgtaattcattctgaggatgtattatatttattgatttgcatatggcaaaccatccttacatttatctctgggatccatccaccacgatcaccttggagaccattctgatgttttaatatcttgttgagtgtttttgtgtctatgttcatcaatgacattggtctgtagttctgtctcttggggctctgtctcctttttggtgtggggaaatgctgacctggtagaacagtttgagaataagtgatgcttctttcacaatttggtaggattcagctgcagagccatctgaggccaggtgtttctttgttgggtgacttcttggttatgcagtcccattactcatgttagtctaatctggttttgtaagtcctaactgtttaattttgagaaacgatctatatctagaaatgtatccattttttctttccctttccaattttttagatgaaattgatttattaaatattgtacatggcatataaggccttttcagatttttttacactgtctctatgatgcaagtataatatattgtagcagacatataattaaaataaaataaaatacctcactttgggatgcctcagcctggacatctaaccagactacagaccaaaaactctgccacatatttttaaaaaacaagcttggaaattaagctaacattcctaactccaactagaggatatcttagttaaaaccctcaaaatataataataataataataataataataataataataataataatttgttacacttaatttacaagtagttcttttgcttggggcatgtagccaaacttgtaatgccctccatagccattcgtatgttttggcttttctttgaaaattcataatattttttgcattaaacacatatgaggaatgtctgccatataaaaatattggtaccagaaaacgtagcttctgacagcattattccaaatcccacagcaagttttactttcttatagaaacaaggcatgcggcccatggcaggctagccagggtagcaagagaaaacctcagagtagcgagagcctagaaaaattcttatcttagggtggatggaaacctaagacaaaaggaggaaatacatgctttccttatggtaaccttctcttttacttcatcataaaacttctgtctgaaaagatcactgtctccacgctgctacatagcttttcacagattcctagttatctctacacattctcttttcacagctctgcctagttgtatccacagccaaactctggacaactactagtgacttttttagggtcagacgcatgacccattatcataacacaagacaaagtcacttggtttctcttaggctaggaatgtcacgtagtctctcttaggctagggatgtcacatagtttctcttaggctagggatgtcacatagtttctcttaggctagggatgtcacatagattctcttaggctagggatgtcatgtagtttgtcttaggctagggatgtcacactgaatggccagtgggtaacaccaggccaagcatgtagctcaaagttggtgaggattcccaacagtaaacaattgggtgaaccttgagttgtatggagcacatgcagaaagtgaagttatgtttaataagttttttcaagcactgacattcaatcatcaaaacaacacctaggaaaattacctcatatatgtgtccccagggcaaccagatatttgcctccagggccaccagacctgctttgaatttgttctggagtcataaattagctgtctgtgtaaaaggctgtttttgtaactgagaatcctgtcagtctaagtaatgtaaaatatcctagtattatttctatttattaaatttttacaccaaaaatcatcttcctgaacattcaatacagctatgtgtgtatccaagacatgtaaaacacaccagaaaaaggctgtgcaaaaaccccacagcttttcatattatggaggaatagcagtggcacgaaacatagttacagatggaaaacagccagtccattgcagtcaataaccctttggctctgcaaagtgacccccccaacagggaatcatttgtctggtgggttcttctctgaaatactagtcagcattggtgtatattcccatggcccctgcattattccaaatcccatagcaagctttattttcatacagcaccaagacattgcatttttaaaaaagtgtacacaatggtcttgattcttcaacccagcaatagactataccctgtctcagctgcatgagaacagttagcattgtttctggagtctgacaggagggtttccagggagcagacagatgggcagctggccctggagccatgttctgaggttttccggttgttggtgcactggtgctcacaggtcactaaggaccctccatggtcctcccatactggttataatgcccccttcaatgtaagataaattagttgcatgtgttttatactctgtctcagttattctgtctaaaagtttatcagttttgtgtatcttctctaagaacagctcttcattatctatccttttaagtatattattttctttatgtagtctttggtctttgttattttggatttgacctgtctttgcgtttcctggtctttgatatgcataatattaggctgttatttgaaatcttatcctttttctgaagcatttattgctttatgtcacacttgttattgatattttaattccttatcatgtggtatgttaactctgtgttcaaaagttttaagaattatcttgttttaggattaaatttatttttttccattacactgttgaaggatgtacaagaaaagagaaatacaatatggcttttgatatattatcaagcaaataggatagtataattattttattgtttgtattaggagtatatagacatggttggaaacaatgttgatttcccttttatttctttgatgaatcagtatttactcagtatcatgtgttcagtctgtataccttcatttacttatataatttctgaagtttcttttatccttttatttccaagacaggatttctctgtgcaacaaccctggctgtcctggatctctctttatgtgtctgtctctgtgtgtctgtctgtctgtctctgtctctgtctctgtctctgtctctctgtctctgtctctctgtctctgtctctctgtctctctgtctctctgtctctctgtctctctctctctctagaccaggccggcatcaaattcacagttctgtccctgccccctgtgtgctgggactagatgtgttcaccatcgcctggctacttttttctttttcttttttccagatagggtttctctgtgtagctctgtaggccaggcagtgctgggattaaaggcgtgtgccaccactgcccagcttctggctagtatcttttattcttgatttttagttatattatattatgcctagaaaaagtacatgatatgatcttgatttttttttgaaatctgttattttgttttgcctagtatctagaatgcccctcatgctgatgagatgaatgtgtgtttggcagctgttggttgaaaggtttggctagtatctttctctgtgagttaagtctggtgtttctttgtatctaaatgtctgtccagtgttgaaagtagtaagctgaagtctcccctccccacattcttactgtattggagattatttccccctttagtgttttatagattgcatgcttcagcatgggtgaatttacatctataatagttatatcttcttggtgaattgatatctttctttgtctctttttatagtttatttcaaagtgtattttatctgatataagcataggtactcctgtctgtcaatggtattcattagtgtggaatgtctttttctgtctactcagtgtgtctacactggtgaagagaatttcctgtgggcagcatactgttagattgggtgacttgctgagtaatttatgtctaagatcattgaatcttcattttaaaaatctccttcacgctatatcttgttagtttttaagtattttttttctttttgataacacattaatattatatattaatgtatctcaccgtgacatcacaggtccatgtattcaccgtgtactattcaaatctagcctccgttttccatccctaccctactacccaccttcctgttttctacatacagatctcgttttgatttttacaatcttatacactgcttggtgagatacagtatgggaacaattaagaaagtaaaagtatgttataaaaatactactgatatctaagtcttgttacattgctatttgagaagggaggataaagctaaccccttcaggatgtgtatcccagaacaatagaattgccatacgaaagagattcctgggcacccactgtgcacagttcacaatagtcaagatacagacttaatataggaaagatacataatggaattttatttagccaccaggagagtgaaatcctattattttatagcagtggagaaaactggaagacattgttttaagaaaaataacccaggcacagaaaaagaagtgtcatcttgtctttttcctatgaggaagtcagtattttttactctggggaatctagtccatttacatttaatttcatcttattaatagctaaagactgactcctgttattttgcttatcttctagattgatgtcttctattttattccttttgctttggtttatgtactgttaatgtggactttatcctacttctcttttgtgttcaaatgagtcttattctttcagtactctttcgtttatggtttaggacttgggtaagtatctggtgaaacttgcactagtggtgatgaattccctgaatttgcttcttcttggtcttcatttcttttttcttcatttctgaatgacagattggccaagaataattttcctggttgccaagtgttttctttcataatttggaatcaatcattcccttaccttcccatgctgaagacttctctttttaaagcagctgttggacccatgggagcattgagtggaactttttactttcctcactcaggttttaaagttctttcaattttaaatatttagagttgtttttaaagtgtgtgggtgtgcgagtgtctctctctccctctctctctctctctctctctctctctctctctctctgtgtgtgtgtgtgtgtgtgtgtgtgtgtgtgtgtgtgtgtgtgaattcaggtgcctgaggagttcagaagaacatatcatgtccctcagagcaggaagtacctcatatttttcaccacagaatatgatttctaatctttctacttggacattcatttgaactctttatgtgcatgtctatcttggagattggggcattttctatttgcaacccatcttttactacagttttcttgtttttaatactttctttggtttctggtgcctaaatgcgtttactctttaataatatctcagaggtactattttctttttcttctatttctttttttaaaattttatttatttttattgtgcaagcattggtgtatgtctgcatgtatgtttgtgtgaaggtgttagatctcctagaactggaggtacacacaattgtgagctacaaattgaattcagctcctctggaggaacatctcttaaccactaagccatccctcctgccccttcctcctccagcttctctacctgagatatttaagaagtcttcaggctcagatttcttccttccctatttgagctagtgtgtatttaacatttgagcctcattttcaggtgacttatcaagctcttcatgtctaagttttctgcttccttcttttccaagatatcaagcactaccttaatttctcattcatcaaatactttgttttcctaactttgtctccctgtgttgtctttagtgatgttcaatttccttgtactcattctttgatttcagattctttatgaggtattttgtcagtacctgtgtatggaggtctgttgtttgtgtgttcctttagaggcatcatgctttttcatacttcttgttatcctgaactgatattcacacactgatggaccacatgtggattgtagaacttttgtgttgtatcagtttggtaagacagtttgccttctgttcctgttgagccctgtggtatagatgctctatagctccagctgtgattgacggctatggatatgtatgtgtgtggttagaagagttggagaccctttctgttttgggcccagtgggtgtgatacctaccactgttgggggtgaggcatttttgtggaactccaactgagagtgggaatggtgtcactgacagtgtggagcatagccaacccacctagggcatctcaattaagtaggggctgtgcatggcagcagttttggacatgggaagcatagacccatgtctgggtctagagatggctgggttaactatgtatcttgagccaattatggtgtttacatgagccactatatgctgtcagcccagagccagtacaggctgtgtcagaagtctccatctactggactcctccagtcaccctttctccctttgtgtggtatcatccagaccaggaaaactgagatacagtttctggtactctattccagtctctaatagttgtgtgtcccaggatgcctgtttctcctttcctgtgtccagcaccgcaaacttcaaaacacagctattcccttgttattctggttcttcctttgggaccaggagtcaagtagtacatgcctttagtcaaccatcttgctcttgccccaaatatatttttaataaaagcattaaactgagcctacacctatctgtttctgacaaagggaaggaggaaatggacagggatgagtctgcaggctgcttctgtaactgactgtcatctctgtcccactgtcctggctcttctgacatcaccagttcatacagcacaggtctctatgtcaggtggccgagaccctctgagttaccacagctgataactgagttcctgtactcaatgccttcttcatgaaccagctcctgacctccatgatatcccatcaggagcctcaggcttgaccagttactctaagggaaaagaagaactcagctttttttagatgagctcttttaaagctggctgctaataacttctcagggctttggattttctggtcagttcttactgttttctccagtctgcccccagccaacattctgtacctgagctctgtgatgacttgtgtcacactgcacccctgttttttccttgtattctactgtttcactgggacccaggcccaagaataaagtgaagacattcatcccaagaattctgggtaaataccaattctaattctgcaagcattctggataaaacccagacataactcccccagtttccaggtgtggtgcagccattcaccagggtgctccatttggctacatgctgccttatcaagaatgaaaaataacaggaaatttatccccaaaggtttcttgctggaaaatttttcattaagagagatacacttttaaaagcacacagtttcctgatagtaaccttttctttcacttgattgtaaaaatgctctctgaaaatctcactgtctccacactgctacatagctcttcataaatttccagttagccctacccaatctcttctcaaacctctgcccagttctttctctcagttctccacagccaaaatctggacaattacaagttacatttttagagtccaacccatggtccattatcataacacaagacaaggcacgtactttctcttaggctaaggatgtcacattgaccggccagtgactaacccctgaccaagcacagagctgtaagttggtgagggttcccagacagcaaacaattggctgaaccttgagcagtatgaagtatatgcagaaagtgaagttatatttaataagttactttaagctctgacattcaatcaccaaaaaaaaaccccaaaaacacaaacaaacaacaacaacaaaaaacacttgggaaaattaccttgtatatttgtccctaggggcaaccagatatttgtctccagggccaacagacctgctttgaatttgttctggagtccaaaattagctgtctgagtcaaaggctgtttttgtaactgagaatcctgtgtcagtctgagtaatgtaaaataccccagtattatttctattcttcaaaattatacagcaaaaatcatttcctgaccatccacagctatatgtgcgtccaagaagtgaagaacataccacaaaagggtgtgacaaagaccccatggctgttcttgttagggaggcatagtagtgtcacactactatgttctaagttacaggtggaaaacaaccagcccattgctttttttccgctgagtagttctccattgtgtaaatgtgccactttttctctattcattctttaattgaggagcactaggttgcttcccggttctggctattacaaatagtgctgctatgaacatagttgaacacatgtccttgttgtaggaatgtgcttcttttgggtatatacctaagagtggaattgttggatcttgtggtaggcagattcccattttcctgaggaatctccatactgatttccaaaatgagtgtacaagtttgcactggcaccagcagtagaggagtgttcccctttctctgcatcctattgaaattctcaggcaaatggatggaactagaagaaaccattttgagtgaggtaacccagtcacaaaaagacaaacatgctatatactcactcaaacatgggttttacacatagagcaaaggattaccagcctataatccacactaccagagaagcttggcaacaaggaggagtctaaaagagacatacatggttccccggaaaaggggaaagggacaagttctcctgagcaaattgggagcatggggggactgcaggattgagttaggaaaatcagaaggggagaagaggaggggtgaggagtacatgagggagcaggaaggttgtgtagggggaagaatagaggagagcaaaatatgagataccataatagaggcagtcattacaggttgaaagcgaaatcaggcactagggaagtgtctagagatctaccaggataacactaactcaccatctaagcaaccgtggagaggctgccttaaatgctctcccctgataatgagattgaagtctaacttataggcaatcctagagccttcatcctgcggctgatggaagtagaagcagacacccacagctaaaaactgaactgaactgaactgaaatctagttgcagagaaggaggagtgatgagcaaaggggtcaagaccacgctggtgaaacccacagaaacagtcgacctgaacaaggggcagcactttgcccccacattatcactgggaaaccagcatggaactgatccagacccgatcaacatgtttatcagtgaggaggccttggaaatctatggggcctctactgatcagtacttatccctagcataggaatggaagttgggatcccatttcacatagacggatactccctcagcctagacacacgggggagggcctgggccctatcccaaaggatatgacagactctgaaccccccatggaaggcctcaccctccctggggagcagaaatggtatttgataggtagggtgtttagtggggggcaggggaggaggggaagggttgacatgtaaaacaatctcgtttctaatttaaatacaaattttaaaaaaaggaaaaatagaacaaccagtcaacacccccatggttttgccatgtgggtctccctcaacaaggaatcatttgtctggtgggttgatctgtgaaacactagttggcattgctgtacattcaattgccccgtgcattatcccaaatcccacagctagttttattttcaaacagcaccaaaacattgttttttttcattcatttatttagttcataaatacacaattttgatacataatacagtatgttcacaatggcatggctaaagtaaaccaattaacatgttatatcacatattcatcatttttgttttgagaacatttaaagtatactatctcacaacttttaaaatatagcatattgttatcaaccatatttatcatgctctcagtagacctcaagacttcacagagtccatgcctcttgtccaactgcagttttatatccttaaaccaatcgtttccccattgttaaaagacccacattgaagcctaatagccacaactctgctctctgttcccataagttcatcatttctaggttacaaaaaaaattgaaattgtgtgacgtttgtcttccagtgtgtcacttttttttttttttttggcaagcatataactttactacttactaaagatgaaatcaaatttgcatgcacaggtgagcactcactgaaacactttggattcatcacatatttgagtttcaattagcatatatatatatatatatatatatatatatatatatatatatatatagagagagagagagagagagagagagagaaataatggcaatatgttatgcatcaatagcagcaacagcttttccaggttctgcagtcatttgaacaaaattgtagagacatcagcacactccatttaaaacaaacaaacaaaaaaacaacaagaacaacaaaaaagtaaaaaacgaaatcccagaaaacagcacagttctgttactcttgtggtacttggcaccatttttttttttaattagcttctcaatcatcatctgggaggaaaccattctgagcaacatcattaaaaacagctctgataaagcaaggtcactactatgtatcataaagcaggtccacataggagtgagtacataccatgtttgtctttttgtgatgggttacttcatggacaatattgaagaggtatggagagagtggacagccttgccttgttcctgattttagaggaattgcattgagtttctcaccatttaatttgatgttggctgttggtttgctgtatattgcttttattatgttgaggtatgttcctgttatccctgatttctccaggacctttatcatgaaggggtgttggattttgtcaaaggctttttcggcatctagtgagatgatcatgtgatttttttcctcagtctgtttatatggtggaatacattgatggatttttgtatgttgaaccatccttgcatccctgggatgaagcctacttgatcgggatggatgatttatctgatgtgttcttggattccatctgccaatattttattgagaatttttgcatcaatgttcatgagggatattggtctgtagttctctttcttagttgtgtctttgtgtggcttgggtatcaaggctattgtggcctcataaaaagagtttggtaatgacccttctgcttctattgtgtggaatactttgaggagaattggtattagctgtactttgaatttctggtagaattctgcactgaagccatctggccctgggctttttttggttgggagacttctaatgactgcttcaatttcattagaggttacaggtctatttaaattgcttatctgttcttgatttaattttggtaagtgaaatctgtccagaaaattgttcattttctttagattttcaaattttgaggaatataggttttcaaagtatgacctgatgattctctggatttcctctgtgtctgttgttatgtccccttttcattcctgattttattaatttgcatgttcactctttgttgttcggtaagtttggataaaggtttgtctatcttgttgattttctcaaagaaccaactttttgttatattgattctttgtattgttctcctagtttccattttattgatttcagccctcaatttgattatttcctggcatctgctcctccggggtgtattggcttctttgttttctaaagctttcagttatgttgttaattctctagtgtgattattctcctgtttcttcatgtgggcatttagcaccatgaactttcctcttaacactgctttcaaagtatcccataggtttgggcatgttgtgtccacattctcattgaattctaggaaatctttaatttctttttttattcttcctggacccatgaattgtgcaattgggtgttacttaatttccatgagtttgtaggttttctgtagttcgtgttgttgttgaattctaattttaaagcatggtggtctgataaggcacatggggttatttcaagttttttgtacctgttgaggtttgctatgttgccaagtatgtggtcgattttagagaaggttccatgtggtgctgagaagaaggtaaattgttttgtatttgggtggaatattctatagatatctattaagtccaattgagccataacttctattagatcttttgtttctttgttaagtttctgtctggtgtttctgtccagtggtgagagtggggtgttgaaatctcccactataagtgtgtgcggttttatgtgtgatttgagttttagtaatgtttcttttacaaatgtggatgcctttctttgcatttggggcgtaaatgttcagaattgagacttcatcctgatggatttctcctgtgatgagtaggaagtgaccttcttcatctctttagactgattttagtttgaagtccaatttattggctattatgattgctactcctgcttgtttcttgggtccatttgattgaaagatctttccccaacctttaattcttaggtaccgtctgtctttgagtttaaggtgagtttcttgtatgcagcagaaggaaggattctgttttcttatccattctgctaatctgtgtctttttataggggagttgagaccattaatattgatggatattaatgaccattgattattgttcattcttgtttgtttttgatttggtgatggtggcaagattatgtgtgggattctgtccctttttccttttggctgttggtaagttgggattatctattgcctatgtttttctggttgtagttaacttccctgggctggagttttccttccaatactttctgtagggctggattcgtggatatgtattgtttgaatctgcttttgtcatggaatatcttgttttctccatctataatgattgaaagctttgctgggtatagtagtctgggctggcatccatggtctcttagtgtaggtagaatatctatccaggatcttctggctttcagagtttctaagaaaaagtcaggtgtgattctgatatatctgcctttatatgttacttgaccttttttcctttgctgctcttaatattttctctttgttgtgtatgtttggtgttttgattattatgtggcgaggtgaccttttttttggttcagtctatttggtgttctgtaggcttcttgcattttcattggtatgtctttctttaggttgggaaagttttcttctatgattttgttgagtatgttttttgtgcctttgagttggatttcttcaccttcttctatacctattattcttaggtttgatcttttcacagtatcccatagttcctggatattttgtgatagggatttgttggacttaaaactttctttggttgatgagtctatttctgctagtgtgtcttcaacccctgagattctctcttccatctcttgtattctttggttatgcttacatctctagttcctgattgtttacccagcttttctatttccagcattccctcagattgtgctttcttcattgtctctatttcagtttttagttcttgaactgtttccttgagagattgatattgattgacttgaagattgatattttgtattttttggttagttttttcttccatttctttaagggattttctcatatcctctttgagatcttctatcactttcctgaagatgtttttaaggtctttctcttctggttcatctgtatcgtgatgttgaggtcttactggtgtatggttcctagtctccggtggtgtcatattgggttttctgttgttggatgtgtttttaccttgtcctcttctcatcctttcttctggtgggtgtagcaagagtttcttgttctcctggtggatgtgggaccaatgttctcttctggtagatgcaaacagatccaatactctgatgctggtcctcttctcgtgaatggaggtgtcactgttccctggatgttggcagtgttcggcatgcagggttctggcccagatggagtcgggctgcctctgggtgtttggtgttcggaacctgccaccaaactggtctggcactcaggtcgcttgtgtcaggtgactctgagcagcgacgacgatcaggggccggaaacagttcctggcctacctggacctcggatggaggccggactgcctctgggtgttcggaactgccaccaaactggaacattgtgttttttaaaagagtacatggtgaacttgattcttcaacacagcaatagactataccctgtctcagctgcataaaaacaggtagcattgttgctggagtctgacaggagggttcctagggagcagacagatgggcagctgcccctggtgccctgctctgagggtttcaggttgttggtgcactggtgctcacaggtcactaaggatcctccgtcgtcctcttatactggttgcaatgcccccttctttgtaacttaaattaattgcatcagctttattctctgtctcaattattctaactaaaggtttcttgattttttttttctgacttcttaaaaaccagctcttcgttatcctttcaactccattttattctctagttgacctctggtctttgttattttggatttggcctcactgtgctttttgtggtctttgaaatacataattagactgtgatttgaaatcttattcttttttctgaagcatttgttgctataaatttcactcttcctattgatttagttttaatccataatgttggctatgttggttctatcttcataagttttaagaattttcttcttttagcctaaaagtttatccttttaaattacattgtttaaggatgtataaaaaatatggcttttgggagattatcaaactaatatagcatactataatttttgttatttttgtagtaaaagtatacagacatggttgaaaacaattttaatttcctttgttatttctttaataagctagtatttagttagtatcatttggtctgcataagttcatataataatattttctgaagatgctttgattgttatttttttcaagacagggtttctctgtgtaaccacactggcagtcctagaattctctttgtagaccaggctggcgttgaattcacatttttgcttctgcctcccaagttttgtgccacaatccagctagtttttttttattcttgatttctagttttatcccattatgactagaaaaagtacatggcatgattttgatttttcaaaagtctgttattttgttttgcctaatgtagagaatgctgtagtgatatgttatttatgatttatttaagtttgattgaacattcagcaagcaaagtcagccacaagctgtagaagccaggcatacatctttaatctcagcaagtcagaagctaggaagtggtggtacacaccttaaatcctaagactcaggattaagaggtagatggatctctgtgagtccaaggccaccaaaatcaacacaagattgatgtagtcctaaaaagaaagagctcacacaaagatgatctcagcacctttaattccagtactagagtggtataaaagataggagcagagtcttcagtagtcagtatcaggcattcattctccagccacattgaggacaggaagacattgaaatctcagagttctccaactatgctgaggagaggttacacttctgaggtttgacttttgaggtttggtggagccaaggtcacatttcagaatgaggtagaatgagagctttgtctggaagtttgaacgccaatattagtctccaggtatgtcatttttttgtgttacatttgttgtgcaagttaaagtacaaattcacaagcatgagctgaaggcgggactcccacctgagtccctcaggcctgagggcctgcctgaccaactaggttttcttttgttttctcttaaaatctttgagcaagtgtgggatttttcagttgtagcttttgtaaaatgtcttcagctgccaaccaaactcaggggactttcaggcttttcctacagcccctttcttggggctgatctctcagctcatggccacaaggtagttttctcattcagacatgctaagctccatggttcactgacatcatgggcagatttggtaagtttgttgggaattcttaaagcaagggattagtttaaaaaaaaaaagaaagtggtttcttgaactgaaaaatggaaaacactattaaaatggagagaattaggtttgtatgtttacacaatggatggtttaaaaatggaaaaagtaaatgaagggataatcaagttaaccaggattgacaaactgctaattatcattttgataatctttattgtagttttgataattcttggtttatctctaaaaaggttggttgatgtgaatgctaagatgaaggccttggaaaacttattaaagtagagatattcaaacccagaccaaggaattacatgaagaaccaaattcagcattgcattttaaggttaaaaatgaacacttgaatgccttaagagaatcatctttaatatatccagtaaccttataggaagtgccaaatgaaggagattctataagagctgtttggaagcctgtgacaatgttaaatttagagaaatttaaggaagctatcatgttatatggcatccattcaccagtggtgaaacagatgataaacatgtagtctgtttgtaatagggttatccttgtagataagatagatttgattaaagctctcctagagattggaccacaattacagtggacttcctgagtcagagaaaagggtaaaaatattgagtaaaaggctaaatctagaggtatagatatttcccaagatcaaattcttggagaaggagattatcctactttagaaaagcaatgtcaatatgatgatcacctcttgagtttatgccatgcagtggctttgaatgcttaggacagaattagagaagcaggaaagaatattgaatcatttacaaaagttatacagggcccaaaggaagcattcatggacttcttacaaagactgccattagcagtcaatagaatggtataagacttagatactagaaaaagaataattaaaacaatggcttttgaaaatgctaatgcccagtgcaaaggataattaggccctcaaaagcaagatcagcacctttggaagattggatccaagatccaattaatattgactcatgctcatgggcatgatgatgatacagggataggagagatgagttcaagaggtttaaagaaatcaaactgtaaaatgctttcattgtgacacacaaggtcacctgaaaagggattgcaaatgtggcatttctagaaacaattatttttataaataaaatccaaacagaacgctttcccttctggtttatgcaaaagtggcaaatgcaggcattggacaaaggaatgtcggtggacaagacattatcaaggtaatcctttgccattgggtaatgccctgaggggactcttgaaggaccctatgtaatgagggattaccaggtaaaaatataaaggtatttattagggagatgccttacttacagagcgacctacccagccggcagggcagcagtaagtacagcaagccgatgatgaaaaggcagaagggagttccacatgcgtgcccctcactcttaaaccttccctacatcacgccctcataggcgtggtcaggcatacctgcagccagcccctagtaggcatggttatggtgtcccttacacctatgtaaaaccctatgccaaattctgttcagtcccttcttgtcaccatggaaaccacttcctagggctattaaagagcctaatacctttgccttacagaagattctcagttttaggaggtcccatttattaattgtagatctcattgtctgtgctactagtgttttgttcaggaagcagtctcctctaccaattcattcaagggtatctcctactttctcttctaagaggctgagtgtggctggatttaagttgaggtctttgatccatttggactcaagttttgtgcatagcgatagacatggatctatctgcagtcttctacatgccagcatccagttatgccagcaccatttgttgaagatgctttctttttttccattgtcaaaaatcaggtgtttgtaggtgtgtgggttaatatcagggttttcaattagattccattggtctacttttgtatttttgtgccaataccaagctgttttcagaactatagctctatgatagaacttgaagtcagggatggtgatgcctccggaagttcctttattatacagggttgttttggctatcctgggtcttttgtatttcattataaagttgagtattcatctttcaagatctgtgaagaattgtgctgggattttgatggggattgcattgaatctgtagattgcttttggcaagattgccatttttactctgttgatcctacctgtctgagagcatgggagagcttttcttcagtagctgatggaaacagaagcagacatccacagctaaacactgagccaaactcctggaatccagttgcagagaaggaggagtgatgagcaaaggggtcaagacaaggctggagaaacctaaagacctgaacaagggggagctcatagaccccagattgatagctgggaagtcagcataggaccaacccagacctcctgaatatgggtgtcagttaggaggcctatcggtgtatgggaactctggtagtggatcagtatttatccctagcatacaaatggactttgagagcccattacatatagagggatacttcctcagcctagacacattgggggggggaggtaggccctgctccaaatgatatgacagactttgaagatcctccaaggaaggcctcaccctccctgggaatgggataggggatcagtagggggcaggggaggaggagagggagagggaacaggggacatgtaaaacaagattgttactaattttttttaaaaaaagatcctaatactaattgtaagaaaacatattattctggatgatagaagagctttagaagagaaaatgaaaaaattaaggagaagccatagatcaaaactgataaagattagattaggaacttccccaaagttaaggctggagaagggctttgtttatgtcttttcaggaaaataaatacaaacatcatgaagaatttaaaaattttcgggcaaataagcatccaaaaaaagaagaaagaactactgagaaaaaaatcagcaagtcaagaaataatctgacttaatgtggtctctaaagtctccaaaagaagattgaatccaagctgggtggaggtcacacactcctttcagaaagcaaagtcaatcacaagctacctttaatcccagcagtcagaagccagcaggtggtggtacacacctttcattttaggactcaggattaagaggtagatggatctctgtgagtccaaggccacccagatctacacaagattgattcagtcctaaatagaaatagcacaaagatgatctcagcaactgggatcactgcctttaatcccagcactagaggggtataaaagataggagcagggttttcagtagtcagtatcaggcattcattctccagccacattgaagataagaagacattgaagtctcagggttctccagtcatgctgaggagaggttacagttctgaggtttggtggagctaggatcatatttcagtctgagatagagtgagagttagtgcctgttgcttttctgatcttcatcttgagtttgaatgccaatattagtctctgggtcttttatttgtatgggacagaatgattcacatgctgatggcattagtgtgtatttgaaagttgttggttgaaagattccactattatctttctgtgtgagttaactctggtgtttcttagtatctggatgtatgtccagtagtgaaagtgggaagctgaagtcccccattctgaatgcagtagagattatttccccctttagtgtttcatagctcgaatacttcagcatgggtgaatttacatctataattgttatgtcttcttggtgaattgatttctttctttgtctctttttatagattacttcaaagtgtattttatctgatgtaagtataggtactcctcgctgctactggttttcattagtgtggaatatcgtctgtctactcagtatgccaatactggtgaagagaatttcctgtgggcagcatactgtttgattgggtgacttactgagttatttatgtctaagaccattggatcttcattttttattgtttttgagacaggttttctctgtgtagctttacagtctgtcctggaacttggttatagaccaggctggcctcaaactcacagagctgtgcctgcctctgactccccaatgctggtattacaggcctgtgccaccacagtccaactatggatcttcattttttaaactcattcaggctatatcttattagttttataagtaaatattttttctttttctttttataacacattcatattatgtattaatgtgtctcagtgtgatattaggtccacgtgtacagcatgaactagtcaaatctagcctccctttgtccatccctactcaacttcccactttcttattttctgcatacagatctcatctttttatgtttttaaagatttatttatttattatgtacacagtgttctgcctgcatgtatgtctgttggccaaaggaggaaaccagatttcactacagatggttgtgagccaccatgtggttgctggcaattgaacgcaggacccttggaagagcaggcagtgctcttaaccactgagccatccctgcagccccacagatcttgttttgatgtttactatcttatacacttcttggtgagaaatattatgggaacaactaaaacaactaaagtttgatggtatgtaaaaatactactgatttctaagtcttgttgcattgctatttgggaaggaaggataaagttaactcccttcaggatgtgtaacccagagcaatagaattgccatactagagagattcctgggtacccaatgtacacagttcacaatagtcaagatacagacttaatataggaaagatacataatggaattttattcagccaccaggaaagtgaaatcttgttattttatagcagtgaatagactggaagacattgtgttaagtaaaataacccaggcacagaaaaagaagtaccatcttttctttttctatgaagaagtcagtattttttaccctggggaatctagtccatttacatttaatttcatcttattaatagctaaacacttactcttgttattttgcatatttgattgattcatgccttctattttattccatttgctttggtttaatatattgttaaagtggactttatcctaattctcttttgtgttccaactgtttcactcattcagtattctcatggtggtagcttttgttctttcatttgtgttttaggactcagctaagtgtctggtggaacttgggctagtggtgatgaattcccatattttgcttctttgtggtcttcatttctttctccttatttcagaatgacagctttgtcaagaacaattttcctggttgtcaaatgttttctttcagaacttggaatcaatcattcccttacccatgctgaagacttctctttgtaaagcaactgttggacccaatagactcctgaatagaactttttactttgctcgctcagactttttttctatttttaaattagaaacaagcttgttttacatgtcaatcccagttccctctccctccccggcacccctgctccccactatccccctatcccatctcctttctactctccagggagggtgagaccttccttggggaatcttcaaagtctgtcatatcatttggagcagagcctaggacttctcccttgtatctaggctgagagagtatccctctatgtggaatgggctcccaaagtcccatatagataaatattgatccactagcagaggtgccatagattgctgaggcctcttcactgacacccaggtttagagggtctggatcagtcctatgctggtttcccagctataagtctggggtccatgagttcccccttgttcaggtcgactgtttctgtgggtttcaccagcgtggttttgacccctttgctcatcactcctccttctctgcaactagattccagttcagttcagtttttagatggggggatctgcttctacttccatcagctgcaggatgaagactctaggatggcatgaaagtcagtcatcaatctcattatcaggggagggcatttaaggcagcctctcaactgttgcttagatggttagatggtgtcatccttatagatctctacattatcctagtgccagatttcgctttacacctataatggctcccactttgatagtatctctaattttgctctcctctattcttcccccaacacaacattcctgctcccttatgtcctcctcacccctcctcttctcccattatcattctcctagctccctctccccttcccccatgctcccaatttgctcaggagaacttgtccctttccctttctccggggatccatgtttgtctcttttagactcctccttgttgctaagcttctctggtggtgtggattataggctggtaatcctttgctctatgtgtaaaacccatgtatgagtgagtatatagcatgtttgtctttttgtgactgggttacctcactcagaatggtttcttctagttccatccatttgcctgagaatttcaataggatgcagagaaaggggaacactcctccactgctggtgggagtgccaacttgtacagtcactttggaaatcagtatggagatacctcaggaaaatgggaatctgcctactaaaagatctaacaattccactcttaggtatatacccaaaagaagcacattcctacaacaagggcttcattcaactatgtacatagcagcactatttgtaatagccagaaccgggaagcaacctagtgcccctcaattgaagaatgaatagagaaaaagtggcacatttacacaatggagtactactcagcggaaaaaaagcaatgggctggttgttttccacctgtaacttagaacatagtagtgtgacactactatgcttccctaataagaacagccatggggtctttgtcacagcccttttgtggtatgttcttcacttcttgacgcacatatagctgtggatggtcaggaaatgatttttgctgtataattttgatgaatagaaataatactaggatattttacattactcagactgacacaggattctcagttacaaaaacagcctttgactcagacagctaattttggactccagaacaaattcaaagcaggtctgttggccctggagacaaatatctggctgcccctagggacaaatatacaaggtaattttcccaagtgttttatgttgttgttgtttgtttgtgtttttggtttttttgtgattgaatgtcagagcttaaagtaacttattaaatataacttcactttctgcatatacttcatactgctcaaggttcagccaattgtttgctgtctgggaaccctcaccaacttacagctctgtgcttggtcaggggttagtcactggccggtcaatgtgacatccttagcctaagagaaagtacgtgccttgtcttgtgttatgataatggaccatgggctggactctaaaaatgtaacttgtaattgtccagattttggctgtggagaactgagagaaagaactgggcagaggtttgagaagagattgggtagggctaactggaaatttatgaagagctacgtagcagtgtggagacagtgagattttcagagagcatttttgcaatcaagtgaaagaaaaggttactatcaggaaactgtgtgcttttaaaagtgtatctctcttaatgaaaaattttccagcaagaaacctttggggataagtttcctgttatttttcattcttgataaggcagcatgtagccaaatggagcaccctggtgaatggctgcaccgcaactggaaactgggggagttatgtctgggttttatccagaatgcttgcagaattagaattggtatttacccagaattcttgggatgaatgtcttcactttattcttgggcctgggtcccagtgaacagtagaatacaaggaaaaaacaggggtgcagtgtgacacaagtcatcacggagctcaggtacagaatgttggctgggggcagactggagaaaacagtaagaactgaccagaaaatccaaagcccagagaagttattagcagccagctttaaaagagctcatctaaaagagttttcccttagagtaactggtcaagcctgaggctcctgatgggatatcatggaggtcaggagctggttcatgaagaaggcattgagtacaggaactcagttatcagctgtggtaactcagagggtctcggccacctgacatagagacctgtgctgtatgaactggtgatgtcagaagagccaggacagtgggacagagatgacagtcagttacagaagcagcctgcagactcatccctgtccatttcctccttccctttgtcagaaacagataggtgtaggctcagtttaatgcttttattaaaaatatatttggggcaagagcaagatggttgactaaaggcatgtactacttgactcctggtcccaaaggaagaaccagaataacaagggaatagctgtgttttgaagtttgcggtgctggacacaggaaaggagaaacaggcatcctgggacacacaactattagagactggaatagagtaccagaaactgtatctcagttttcctggtctggatgataccacacaaagggagaaagggtgactggaggagtccagtagatggagacttctgacacagcctgtactggctctgggctgacagcatatagtggctcatgtaaacaccataattggctcaagatacatagttaacccagccatctctagacccagacatgggtctatgcttcccatgtccaaaactgctgccatgcacagcccctacttaattgagatgccctaggtgggttggctatgctccacactgtcagtgacaccattcccactctcagttggagttccacaaaaatgcctcacccccaacagtggtaggtatcacacccactgggcccaaaacagaaagggtctccaactcttctaaccacacacatacatatccatagccgtcaatcacagctggagctatagagcatctataccacagggctcaacaggaacagaaggcaaactgtcttaccaaactgatacaacacaaaagttctacaatccacatgtggtccatcagtgtgtgaatatcagttcaggataacaagaagtatgaaaaagcatgatgcctctaaaggaacacacaaacaacagacctccatacacaggtactgacaaaatacctcataaagaatctgaaatcaaagaatgagtacaaggaaattgaacatcactaaagacaacacagggagacaaagttaggaaaacaaagtatttgatgaatgagaaattaaggtagtgcttgatatcttggaaaagaaggaagcagaaaacttagacatgaagagcttgataagtcacctgaaaatgaggctcaaatgttaaatacacactagctcaaatagggaaggaagaaatctgagcctgaagacttcttaaatatctcaggtagagaagctggaggaggaaggggcaggagggatggcttagtggttaagagatgttcctccagaggagctgaattcaatttgtagctcacaattgtgtgtacctccagttctaggagatctaacaccttcacacaaacatacatgcagacatacaccaatgcttgcacaataaaaataaataaaattttaaaaaaagaaatagaagaaaaagaaaatagtacctctgagatattattaaagagtaaacgcatttaggcaccagaaaccaaagaaagtattaaaaacaagaaaactgtagtaaaagatgggttgcaaatagaaaatgccccaatctccaagatagacatgcacataaagagttcaaatgaatgtccaagtagaaagattagaaatcatattctgtggtgaaaaatatgaggtacttcctgctctgagggacatgatatgttcttctgaactcctcaggcacctgaattcacacacacacacacacacacacacacacacacacacacacacagagagagagagagagagagagagagagagagagagagagggagagagagacactcgcacacccacacactttaaaaacaactctaaatatttaaaattgaaagaactttaaaacctgagtgaggaaagtaaaaagttccactcaatgctcccatgggtccaacagctgctttaaaaagagaagtcttcagcatgggaaggtaagggaatgattgattccaaattatgaaagaaaacacttggcaaccaggaaaattattcttggccaatctgtcattcagaaatgaagaaaaaagaaatgaagaccaagaagaagcaaattcagggaattcatcaccactagtgcaagtttcaccagatacttacccaagtcctaaaccataaacgaaagagtactgaaagaataagactcatttgaacacaaaagagaagtaggataaagtccacattaacagtacataaaccaaagcaaaaggaataaaatagaagacatcaatctagaagataagcaaaataacaggagtcagtctttagctattaataagatgaaattaaatgtaaatggactagattccccagagtaaaaaatactgacttcctcataggaaaaagacaagatgacacttctttttctgtgcctgggttatttttcttaaaacaatgtcttccagttttctccactgctataaaataataggatttcactctcctggtggctaaataaaattccattatgtatctttcctatattaagtctgtatcttgactattgtgaactgtgcacagtgggtgcccaggaatctctttcgtatggcaattctattgttctgggatacacatcctgaaggggttagctttatcctcccttctcaaatagcaatgtaacaagacttagatatcagtagtatttttataacatacttttactttcttaattgttcccatactgtatctcaccaagcagtgtataagattgtaaaaatcaaaacgagatctgtatgtagaaaacaggaaggtgggtagtagggtagggatggaaaacggaggctagatttgaatagtacacggtgaatacatggacctgtgatgtcacggtgagatacattaatatataatattaatgtgttatcaaaaagaaaaaaaatacttaaaaactaacaagatatagcgtgaaggagatttttaaaatgaagattcaatgatcttagacataaattactcagcaagtcacccaatctaacagtatgctgcccacaggaaattctcttcaccagtgtagacacactgagtagacagaaaaagacattccacactaatgaataccattgacagacaggagtacctatgcttatatcagataaaatacactttgaaataaactataaaaagagacaaagaaagatatcaattcaccaagaagatataactattatagatgtaaattcacccatgctgaagcatgcaatctataaaacactaaagggggaaataatctccaatacagtaagaatgtggggaggggagacttcagcttactactttcaacactggacagacatttagatacaaagaaacaccagacttaactcacagagaaagatactagccaaacctttcaaccaacagctgccaaacacacattcatctcatcagcatgaggggcattctagatactaggcaaaacaaaataacagatttcaaaaaaaaatcaagatcatatcatgtactttttctaggcataatataatataactaaaaatcaagaataaaagatactagccagaaactgggcagtggtggcacacacctttaatcccagcactgcctggcctacagagctacacagagaaaccctatctggaaaaaaaaagaaaaaaagtagccaggcggtggtgcacacatctagtcccagcacacagggggcaggggcagaactgtgaatttgatgctggcttggtctagagagagagagagacagacagtcagagacagagacagagacagagacagagacagagacagacacacagagagagatccaggacagccagggttgttacatgagaaatcctgtcttggaaaaaaaaggataaaaggaagcttcagaaattatataagtaaatgaaggtatacagactgaacacatgatactgagtaaatactgagtcattaaagaaataaaagggaaatcaacatttttccaaccatgcctatatactcctactacaaataataaaaaattatactatcctatttgcttaataatatctcaaaagccatattgtatctctcttttcttgtacatccttatacaatgtaatggaaaagaataaatttaagcctaaaggaagataattcttaaaacttatgaacacagaattatcataccaaatgataagaaattaaaaaatcaacaacaagtgtgacataaagcaataaatgcttcagaaaaaggataagatttcaaataacagcctaatattatgcatatcaaagaccaggaaacacaaagacaggtcaaatccaaaataacaaagaccaaagactacataaagaaaaaatatacttaaaaggatagataatgaagagctgtttatcgagagtatacacaaaatcaagaaactttcagatagaataactgagacagaatataaaaaacattcagttaatttatcttacaaagaagggggcattgcaaccagtataagaggaccatggagagtccttagtgacctgtgagcaccagtgcaccaacaacctgaaaacctcagaacatgactccagggccagctgcccatctgtctcctccctggaaaccctcctgtcagactccagaaactatgctacctatttttatgcagctgagacagggtatatagtctattgctgggttgaagaatcaagatcattgtgtacacttttttaaaactgcaatgtcttgatgctgtattaaaataaaacttgctatgggacatggaataatgcaggggccatgggaatatacacaattgccaactagtatttcagagatcaactcaccagacaaatgattccctggtggaagggttactttgcagaaccaaggggttattcactgcaatggactggttgttttccatttgtaactatcttttgtgccactgctattcctccctaataagaacagctgtggggtttttgccacagcccttttctggtgtgttttacatttcttgggcacacacatacctgtggatgatcaggaaagatgatttttgttgtataattttactaaatataaataatcctaggatattttacattactttaacaggattctcagttacaaaacagccttttaaacagacagctaatttatgactccagaacaaattcaaagcaggtctggtggccctggaggcaaatatctggttgccctagggacacatatatgaggtaattttcccagatgttgttttgatgattgagtgtcagagcttgaaacaacttattaaacataacttcactttctgcatgtgctccatacaactcaagattcacccaattgtttactgtctgggaatcctcaccaactttgagctacatgcttgggcctggtgttacccactggcaattcagtgtgacatccctagcctaagagaatctatgtgacatccctagcctaaagagaaactatgtgacattcctagcctaagagaatgtgacatccctagcctaagagaaaccaagtgactttgtcttgtgttatgataaagggtcatgggttggaccctaaaaaagtcagtagtagttgtccagagtttggctgtggagacaactgggtagagctgtgaaaagagaatgtgtagagataactaggaatctgtgaaaagctatgtagcagcgtggagacagtgatcttttcagacagaagttttatgataaagtaaaagagaaggttagcataagaaaagcatgtatttcctccttttgtcttagatttccatccaccctaagataagatttttcaaggctctcgctactctgagtttttctcttgctaccctggctagcctgccatgggccgcatgccttgttgctataagaaagtaaaacttgctgtgggatttggaacaatgctgtcagaagctaccttttctggtaccaatattttcagatgtcaaactttcctcatatgggtttaatgcaaaagatattttgaattttccaagaaaaaccaaaacatacgaatggctttggaaggcattagtagtttggctacatggcccaagcaaaagaaccagatgtaaattaagtgtgaaaaattattattattattattattattattattattattatgttttgaggattttaactaagatatcctctagttggagttaggagtgttagcttaatttccaagcttgttttttaaaaagcatagttttcagtctgtagtctggttagacgtccaggctgaggcatcccaaagtgagggattttattttattttaattatatgtctgctacaaaatattatacttgcatcacagagacagtataaaaaaatctgaaaaggccttatatgccatgtacaatatttaataaatcaatttcatctaaaaaattggaaagggaaagaaaaacatggatacatttctagatatagatcatttctcaaaattaaacagttaggacttagaaaaccagattagactaacatgagtaatgggactgcataaacaagaagtcacccaacaaagaaacacctggcccctgatggctctgcagctgaatcctaccaaattgtgaaagaagcatcacttattctcaaactgttctaccaggtcagcatttccccccaccaaaaaggagacagagccccaagaaacagaactacagaccaatgtcattgatgaacatagacacaaaaacactcaacaagatattaaaacatcagaatggtctccaaggtgaccgtggtggatggatcccaccaccataaatgtaaggatggtttgccatatgcaaatcaataaatataatacatcctcagaatgaattacaaaatcataaaaatcatctcactagaagtagagaacattggctaagattcagcattgcttcatgatttaaaacttattggaggctcatccctaacatgatcaagagtatagaagaagccacagcctgcatcatattgaatacagggaagctgaaagcatttcctctgttatttttaaaaagacaaggacattggttcccaccattctcgttcaatatagtcctaaagatgttaggatgaacgacaataaaagtgcagagaagacaaaaagggagagaagtcaaatgtcaaaaactccattacggctagcagaatctccactctggcgcctaaaaccaacatacaaaactcactagcattttaaaacatcaacaaaggaatttactggaaagaaatcataaaagcagccccttcacctcagtaaaagaaaacaaaaaacaagttccaatgctttctaccatgctttaggtaaaaggagttagtttccctgtctgaccaacagtttaccctgctccagctctgtttgttccagactgacctaccagaggctgcaactataaccttactgggcttggaaggtgtcagggcaaattcttgcactggcaagcctttgtttgtaagaaggtggtctcgactttactgctgctttgagttagtgcggtgggcatgccttattctgatatcaagaaatggcctcaaacctagagtaactttggcctacaaaatgatttgagggcaagagcagaaggggaaaatgctgtgaaagggacaaggtcataagggtgaccagatgacggaaaagtgggaaaggtgatcaagacccaagaggcaatactgtgggtgggcggatagggggtggagctggaactttacatccaggctcaaagagctcccaagggatataaaaggcagactgagcactaggaaagcagcctagcccagtcctgtcactggctgagtctcccagaagctgccccaccaagatgtcctgcagattcgtgttccagctcctggggctctggctgctgctgagccagccttgcagggcgcgggtcacgaaggagtggctggacgaagtcatccatgtgtgcggtcgggaatatgtccgtgcggctatcgatgtctgctcgaaggccattggcgtggaggagccagctaggcgacataggcgaatgacaggtgagccaggtgagccagcgccctcttccctgcattctgtgcttcccaccggctgcccaccaattggaaagccacagtcctccgtggtttgtgatccccagcctcaagtttggtctttataccttgcttgggttcaagagtttcaatgagaacccatcagagggaggtgggcgtgcagccgctgccatcaatttcgtgctagggtagcacttgatccaaatctgggatgtggagtgtgcccaggaaaactcctgctcccggtattggtatttgaggcatgtcacccagcaagccttgtcctacatctttttgagttgggtcttgcagttcaatcgaaagagtagggaaatgcaggagaaaccctagagaaacctgacggggatcagtaagaagggaggctcgcttttaaactaccatggccaaaaacgcattggtgctataatccaacgattaaaaagcaggtacccgtgtgagctcaagtagattaaaatgtaatatttgagtttagtatctataaattaaaactatggatttccaagtaagtcaaaaatattttaaataaagaatttcaaggcgcaaaaccctgtaagttaactctgacccaaactataacaggcctttgcttgtttactctaaatacatagagagtgatcatcaactttgctttgccgccaagaaagccctatctggacaaaatttttagagcaaggagggaccaataaggtgagttaaggttagagagtcttactgcaaaaaagagttaaagcttctgatacacataaaatggtacagaatgtcacctgccatgcccagtttagacaatgaatgagccgggagcagtgagaagataaattcctttccctctgccaaattccaactgctgaagtgtatcattgatatacttcaatcctcagtaaacaacaggattgtcaggaagctttgtcccaggcacctctgtataggtgaaggttttggctttctctacagggtaagcctccatggctaaacaggcatctcccttacacccttacgttgtatctcttagattctttggttttattgcttccagaggaatgacttactgctaagctgaagagcagcagcaagaactgagcctttgtactaaaactgaaacataaccaacatttccagtttttttgtttgctaaaactcaatttctgcatttggaataagtgaggccagggaagactttgtgttactgtaagggttttttttgggggggggagtgagggaactctttatttttggcagaatatttttttaaactcctaactggcattgccacatggaacagttagtgaattgtgaactatagatatgtatgaagaaggcaggtgccaggtgtttctaaaggggttcccacagcactgggcaaaccccacacttaacactctggcacaccctgggagacaccgttctctttgggaagcacatggcttgggattaccgtgcttttagccaccggttctcaacgtgtgggtctagacccctgggggcaggggtcacatagcctgcatatcaggtatttacataacgattctcagcagtagcaaaattacagttatgaagtagcaatgaaaataattttatggttgggggtcaccacagaatgaggaactgtatcaaagggtcaggcacagcattaggaaggatcagaagtactgtttaaagctgggtctctctgcaatatgcaatatcattgattggagccaacactctggggaagaaagattgccatggaagtgcttagagacatacttgcccctctggtcagagctgaactgctgtgaaattctgtcacttaaactttatcctgaagcagtaacttgatattacgggccacttacaatcttcaaattttgaaaatagttttcaaggattacttactttcacaactcaaaagcaatgaagaaaattactcaggctagaaagcatgtaaatgactggggttttgttttgttctgttttgctttgttttgagacaaggtctctccacacagtcctggctgtcttgaaactcactctggctggccttgacttacttccttgagatctacctgcctctgtcccccaagttctgggattaaaggcatgtagcactagaaaacatgaaaactagtattttcaatggccaacatgatttcagaaaaataagagttcattatcaaagggtgaaaattactgtgatgaaaaagcaagaataagtgcttaagaaagatgttggccagtgctcaggaggcagagggtctctgtaagttcgaggccagcctgatctacagagtgccaggaaaggctccaaagctacacagagaaacactgtctcgaaaaaccaagataaataaatgaataaataaataaataaagatgttggaaggccgtgtggaataaacagaaccttggcaagaacaaccatttagatagtcaatacctgctgattgtgtgtcagtgtttaattgtatcctggcaaaatgggttttgtttttttgtttttttctattcaactgtctgcagtttcctgaatgttccttgacatgactgttctctccccacccactttcttttaaacgtaacagaagctataacctccttcatcaaggaagacgcacagccttttgaaacgatgcctaaacgccttccaaattcatcagaggagccccaggcagcactgtctgaggggcatccctctctgcctgagcagcaacaatatgcgcctgtatcgagcgattcagttggtagcttggaagactttaaggaaagtttccgtgctacacaaggtgaagccgaagacagcagtcctccagagctgaaatccttacacttggacactctttcccggaaaaagaggtacaccggtgtttacatgagtcatcagtgctgcttccggggttgctcaagaagatctcttgctagcatctgctgatctggagctgagggtgtacaactcgcccagcgttcacacgcattcgtgccccctgctcgatgccgctttctgttcctcttgatcatttccggcaatctaagaaatggatgtttacatatggatttgtcatttgacgtgaaagaaatgtcctctgcattattgtagttctgttaataacacgtttatgcaaaactccttttgccctttgagtcttattgttttttaataatatccctttaaaatggctatagaatcttaccacataaccatatataatagttcagcttaatacaatgccctcttaggaaatcttaagccgtcttctggcctctgcaggcaccacacacgcaagtgacacagacatacatgcaggcacaatagccatacacgtacaattaaagagtaatggtaaaataaaatgcatataaatatttatttatttatttaatatattttaataaatccactcaactgtgctaatgatatggactgggtaataaatatgaacaaaagatggctccattcactaatgagcttttaacaaaaagattttaaacactaaacagtgtaataataaactaaaatgatgtcagaagtagggaaacagtacaaagtaactcatacattctcctttattgacttattcattaatttaccaaatactatgaacttactagtagttaattgattatttgttgataatactattagttttatctattacactaaagcattgttaagaacctactgttttccagacactgttcaaggcaaggaagacatcacaggaaacaaattagatgaagattcttacctgctggagaacacattctggtaggatgggagtaaacaaacaaagaagctaaattgaccacatgtcagtatgtaaggggtggcatctgaaaatacaaagcaagacaatagggttactattgctgtgatgaaacaccatacataaccaaagcaacttggggggaaaggtgcttatttggcctatgtttccacatcactgttcatcactgaagtatgtagggatgaaagtcaaacagggtaggaacctggaggcaggagatgcagaggccatggagaaaagcagctggcttgctcccatggcttgatcagcctgtcttcttagaacctatgaccaccaacacagaggtggctccacccacattgggctgggccctccccatcaatcagtgactaagaaaatgcccaacaagcctgccttcagcccaatcctatggaagcatttcctcagttgggggtccctcgtctccaatgactctagcttgtgtcatgttaacacagaactagccagagctggtgtagaaagcacagagcatcatgtaaatcgggtgggctggtacatatattttcatctttaagtctccatctataaatgatgggtatgctcttctctcacagcgctcccctgaagagttctgagtagaacatatggcccactgtagtttggatattggttatttctcaaggaaagtgatgagattatcctaatctatattatatcatctttaataactcagactgacagttgaatttacagtattcatggatgccactagaactgtggcaaaaaccaggggaacagaaaatggagaagagagagtcagaagtcagaaagaaattacaggtggacatgccgactatattacttacatgcctttctgtggctggcattctgaagttgatgaaactacttccatataataaaattccattggaagtgatgaacaaggcagttatcaatgcagaggctcataatgactcaaagtagagcgaataagtgattgattatctagttcttaggcctaacctcgacatctatatcacctccatcaaggcccacgggatgtcggggaagagtgaagtggcaaaaactgaaaagctttaaagcatggggaagagtgctctgcaaagctttctcttggacatggacctggcaatttgtgcccttcagcgttccgtcaagcatcagggattgggttgagagcgcttatgaggtcttacccctccctgagaggtgtcagtttctgcaggggtgaagttgtccatgatacaggaagtaacttacccatgcccattcaagccactcagtgagtcaaaagaagagcttggttcaacatacatgagtaaatatgtgtcattcaacacataaatggctccaagggcagaaaccacaagaccatctcagttgacatagaaaaagccttctacaaagttcagcatcccttttgtgataaacgccctgtagatactaggaataaaatgagcatgtctcaacctaacacatctttgggcaatattatgccaaatgggaaaaaaactgagaaaatgtgcccaaaattatgaaacaaaacaaggtttctctttattgacttgaatatagtgctaaaattcttagagcaactagaaaaagaaatgcaagagatacacatataaaagaatgaagtccaagtatccctacttgctgatgacaccatcttattatacctaagagatactaaagattgtcccatttatccatctcttttgaaagatagctttggtagccacagcaatcttggtcagaagtcatttaattccagttcttgaaattatccctcccctgctgtcctccttaaggttcttgcttacaagaaatcttatgctactctgtctctgtcaaccaaccaagcaaccaaacaaacaaaaaaacaaccctaaaacagatacatggaccaatggaatagtataccagaccccaatagaagctacacatttatagccacctaatttttggcaaaagtaccagaaacttattatggagaaaagataatctctttaacaatggtgttgagaaatatggatttccacacaaagaatgaaattacattcttccacgctgtatttttttttttcgagcctgggtttctctgtgtagctttggagcctatcctggcactcactctggaaaccaggctggcctcaaactcacagagatctgcctgcctctacctcccgagtactaagattaaaggagtatgccactaatgcccagctacactgtacatttttttaaattcaaaattcttcaaagactttgaaacttgaaactgtgaaactgcaagaggaaaacatagggtaaacacttcaaaatcattataaccaaagactttctgaaaaggactcccaacagcacaggaagtaatcccaatattaaaaactgtgatcagatgatattaaaaagctccatacaacaaaaaacaaaaacccagccaccacagtaaagagtgtagcctacagtatgggggaaattatttactaattatacattcgacaaggcaacaatatccatcctgtatgaagaactgcaaattttggttttggttgtgagcctagcctttaacagctgagccatctttgcagcccgaggaactgcaaattttaaaccccataaaagctagtgttataatcaataaataggctaataaattgagctttcaaaacaaaaatgaaaatggcttaaaaaggtatttgaacattttttacctaccagggaaatacaaaatatgactgctttgatgaaatacgaattataactgctttgagagtccatctcacactatcaatacacaaagcacatggcagcaaattctggcaaagatgtgaggaaaaaggagaatttgttcaccgctggtgagaatatgattttatgttgccagtatggaagttcctcagcagactgaagatagaactatatagaatcacccagcactatggtgcttgggaatatatcacaggggctatgagtcaacgtctcacagagatgctcacttgttcattgctccactactcaaaatagctaggaaatgggaagcctagatgtccttcagctgatacaacatgctgttacaagggctcagtagttaagagcatttgctgctctttcaggggacctgagtttggttcccattacccatgtcaggcagttcctaacacttgtaccttcagctctaggtgacctgacaccctgttttgaccacagtgggcactcacactcaaatacacatacccacacaatacttaaatataaaaactacattagacaaaagaaaatatgataaatatacacaattggatttttatacattcataaagaaatatgaaactattatctttgaaggaaaacagataaatatatatatatatatatatatatatatatatatatatatatatgcacacactgtggcacacatacatactgtagcacacactcacaccagtaaatatgtacaataaaacaataaagatttattataagaaggatgtgttcatacaaataaactaaggcaaactttaccaggaacaggacactaaatgatgttttcacttacatgtggactctagatttaaaactatacatttgtgtgtttatataagtgtatgcttgaatatgtgtgtttgtaggtcatgaaactacaaaggggagcccgagaaggatgagtgcctaagaaagataggtgggaatcaagtaatagaatgcaggttagcaaaaagcaggaagggactgctgaaaaggaaactgaacttgtgggaggtacgggagagagagactacgtgacaacaaactgtaatgccataggtgtgagaagatgccatgatgaagcccgtcactttgtgtgccaacctacaacattaataattttcaaagatttattttacttgatgtgtatgagcgtttgcctgcacgtctgtacatgcaccacgtgtatgtctggtcctgatggaagccagaactggagtgacagactgttgcgagctgccatctgggtactgggaaaggaacccagttcctctgcaagagcagcaagggctcctaaccgaggagccatctctccagctccagtaataactttttaaagttaaaaaatattacccatgaaggagatgagagaatgtttcttcgaagggaagagatgcctcatgcaaccactacgcaaaaaggagttcacattccaggtggagtttgcagcatcttccattatttgtgtttttggttactcagggtcctcctatgctctcatattttaatggcagtctcttggcgaggacgacaaggaaaatgaataaaagccagggaacggaaacttttctttcacttctgagcgaataggagcctattttcttcaacgtcctgcaagccggaagtccaagcaagcctggaacatcccacaccgaacctcagtgttctggaaaagattgcgggatcccgagcactgcgtgaggggggcgtgacgagggggcgtggtgtggtggggagggggggggcggggcggggcgatggccgttgcagcgagcctggccctgcggtggagcccagggatgaagcagctgtgctgttcatgtctgttgtggtttggactcctacaggctgctttctcctgggaggaaatggagaacagacccaggaagctgtgcggcaagcacctgctgtcacaaatcataaagctctgtggccaaaccgattggacacagtttgagatcgatgagcaaacttctctgggacacatccctcatcagagctcacatccgcctaaaaccctcaaacctgagcaaatcccttcttcttcggcctggagaaaattcacacacccaggtaaaactttgaacggagggtgggtgtttgctctccactgtgcattgcttagactcgactttgctccaccactgagtttctgcgggaaatagaaatttgtgcctagaatacatgtaactacaattttaaaacatacaaaccgatgtgacgtttactttagatatagaataatgtggtcagaggcgtcctcattaaaaagaggttgctgtggtttcaatatatcccccaaattccatgggttagaaggctagtcctccgtgcagcagtgctaggaggtaggggctagtaaaagggaactaaatgtccttgagatgaattcaggccatcatcacagatgtagattgtcctcagtgaatttgttgcaaaatcagcttcattctcctctcactttgttgttctcacacccttgtcccacacctccactatggaataatgttacaggaaggtccttggacactgtcacatctacaaacgatgaattgaatattgttcttttgaaattagacactgccaggcatggtgtcttgacagtagaaaatggatagaggtggttgaggagggggtcttagtttagaggaaacaccaggagaaagacccctctatctgaattatacctggagaagcacggagatcagggtggcctggacaggaaatgaaacaatcagctcaggtcagtaaggttcattcagaatgtctgacagagtaaacaagcagacccaaaagtgcagtgaaaaccaataaaggacacagggaaagattgaggagatgaattccggcatggatcgttcatctatgcagataggcaggaagggagactatctgggaatagatgttaagaaatgagctcaaaatggtgaaattccctgatgattgcagcagccgctggctgaactcaaattaacatgaggaactgaattttgtgaccttgacccacccttactggcttcatataagcctttctcctatgttggtaagatgtatctaagatttacttaactgatttcatagttgttgtttttttttttaactacatttgtaactgaaatcacttataagaactttaaaaaaacaaaactcagtattcttacctggtttggaaatagggattataaatgagcttcataaaacgacatggaactgtttgaaaactactgttctttaaaaataggtggaatccatctctaaaaccatctatgtgcacatcttctagggcatggctagctttgctttagatttccttgtcattgaagtacttaagttttggatgtctgtgtgtgtgttaaggttttcacagaaattcatttcatcttgattccatacgtttaagaattaataatcatttatttagaaacttggttctacctatactattcttttcttcctgtattttgctcacctttatctttgtgttcttgtttagtttagctatgattctattctgttttgttaatcaaacagtagcaggaaagggtagcaagtagtcctctagcttcagggactgagcttccctggcagaacatcatgaaagaaaggaagaaatgaaagacccagtgatgaattcagaaggcccacccccataattctcttttctttccccttttcttcctcctcttcgtccccctttctctttttgctcatttgtatttatgtccctttattccatgacaagcctcataaaatcttttcagtcttgaatctcactaacttgtctctttctaagcattagagcaaaaagaagcaaactcaccaaggaggagtagacgccaggaaataatcaacctgagagctgaaatcaataaagtagaaactaggaaaacattacatagaatcaatgaaacaaagagttggttctttaagaagatcaacaagatagacaaacctctagccaaactaaccaaaaggcagagagagggcatgctaattaacaaaatcagaaacaaaaagggaggatataacaacggacactgaggaaatccagagaatcttcaggtcatactttaaaagcctgtactccacaaaattcgaaaatctaaaggaaatggacagttttcttaataaatatcacttaccaaaattaaaccaagatcagataaacagtttaaatcgacccataacccctaatgaaatagaagcagtcatcaaaagcctcccaaccaaaaaaagcccagggccagatggcttcactgcagaattctaccagaaattcaaacaagagctaattccagtactcctcaaactgttccgcacaatagaagcagatgggatattgtcaaactctttctacgaggctacaatcactttgataccaagccacacaaagatatgactaagaaagagaactacagaccgatatccctcatgaacatcgatgctaaaatactcaataaaatattggcgaaccgaatccaagaacatatcagaaaaatcatccaccacgatcaagtaggcttcatcccagggatgcaaggatggttcaacatatgaaaatccatcaatgtaatccaccatataaacaaactgaaaaagaaaaaccacatgatcatctcactagatgctgaaaaagcctttgacaaaatccaacatcccttcatgataaagatcttggagagaacaggaataacaggaacatatctaaatacaccaaaccaataaccaacatcaaactaaatggagagaaactcaaaaaatcaggaacaagacaaggctgtccactctctccatatctcttcaatattgtacttgaagttctagctagagcaataagacaagaaaaggggatcaaaagtatacaaattagaaaggaagaagtcaaattttcactatttgcagatgacatgatagtctacattagtgacctgaaaaactctaccaggaaactcctacagctgataaacaccttcagcaagatagcaggatacaaaattaactcaaaaaaatctgtagccctactgtatacagatgataaacccaatgagaaagaaatcatggaaacatcacctttcacaatatccacaagcaacataaaatatcttggggtaacactaaccaaaaaagtgaaagacctgtacaataagaactttgagactttaaagaaagaaattaaagaagataccagaaaatggaaagatctcccatgctcttggataggtagaattaacatagtaaaaatggcaatcctaccaaaagcaatctacagattcaatgcaatccccatcaaaatcccaacacagtttttcacagatattgaaagaacaatactcaactttatatggaaaaataaaaaacctaggatagccaaaacaactctttacaataaaggatcttctggaggcatcaccatccctgacttcaggctctactatagagccatagttctgaaaacagcttgatattggcacaagaatagacagatagaccaatggaatcgaattgaagacccagatattaacccacgcacctacaaacaccttatttttgacaaaggtgctaaatctgtacaatgaaaaaaagatagcatcttcaacaaatggtgctggcacaattggatttggacatgcagaagattgcagatagatccatacctgtcaccatgcacaaaacttaagtgcaaatggatcaaagatatctccataaatccagccacactgaatcttctagaagagaaagtgggaattacgcttgaacaaataggcacaggagaccgattcctgaacatcacgccagtagcacagacactgaggtctgctattaataaatggaacctcctgaaactgagaagcttctgtaaggcaaaggacacagtcagtaagacaaaacaaccacccacagaatgggaaaagatcttcaccgaccccacatctgacagagggctgatttccaaaatatacaaggagctcagaagctagccaccaaaacaccaaacaatgaaattaaaaagtggggtgcagaactaaacagagaattttcaacagaggaatctgaaatggctgaaagacacttaagaaagtgctcaaaatccttggccatcagagaaatgcaactcaaaacaactctgagataccacctcacacctgtcagaatggctaaaatcaaaaataccaatgacaacctatgctggagaggatgtggagaagaaggaacactcctccattgctggtgggagtgtgaacttgtaagaccactctggaaatcagtatggcggttgctcagaaaaatgggaatcaatctacctcaagatccagccattcctctcttgggtatatacccaaatagtgcatgttcatacaacaaggacatatgttcaaccatgttcatagcagcattgtttgtaatagccagaacctggaagcaacctagatgcccctcaactgaagaatggatagagaaaatgtggtacatttacacaatggagtactactcagcagaaaaaagcaatggaatcttgaaattcgcaggcaaatggatggaactagaagaaaccatcctgagtgaggtaacccagtcacaaaaagacaaacatggtatgtactcactcatatatgaattttagacatagagcaaatgtttaccagcctataatcctcttcaccaaagaaactaggtaacatgaaggactctaagggataaatagaccccaggaataggaagtggcaggaactcctgagttaattgggagcatgagggtaggggagagggtgctgccacaataagagcacaagaagaggagtagaggagaggaaatggaggagcagagatattgagtagggggaagaatagaggagagagagcaggatgagagataccatattagagggagccactataggtctgagaagagatctggaactagggagatctccagagacctacaaggatgacacgatctgacaatccaggcaatggaggagaggataacctaaaagcccttcccctaaaatgagattgatgactactctttatgccatcttagagccctcatccagtggctgatggaagcagagacagacatccacagaaatacactgagctgaaatctggaatttagttgaagagagggaggaatgaagatcggaagggtctgtaccaggttggagaaacccatagaaacagttggcctgaacaagggagagcacaccgaccccagatgctgtctgggaggccagtacaagactgatccagacccctgaacatggatgtcaataaggaggcctctgcactccagggagcctctggaagtggattagcatttttccttggtgtaagaagggattttgagagcccatctcacgtgaagggttacactctggccctggacacatgggtaatggcccaggcccagcccaggaagagttggtggactttgcagagcccccgttgagggccctaccctgcctggggagtggtgggtggatggggtggggggtaggttggggtggggaaggagggatgggggtgaggggagggagagggagaagggacttacatttgaaacaagcctgttccctaacttgaattaataaaaaaaatttctaatttgaaatttgaggaagaatcatctaatttcaaaacacagggatctgacaaaaccaactaattttcccataacccacgaatcatccaccataatagttttctgtctttgagcttgcaatggagttgcgccacctagagcatggcttacagagctggaggttaaggcctcaggaaaaaaaaaatgtcctcctaggaagtactgaatatggccacagtggacatgcaggagttattttagtttctgtcacccagcgtccagtgttgactgaattcagaagaatgcaacaataaatctgtcccttgagcatatctccacttctcacatctttacattttgttaaagaacaaagtgtttctactaactacctagttataacctacacaaacaaagacagcctgactggaaatgaagaaaggcaacatgtgaagaaataaagatgagcatgggatttaataggtatccctccaaagatgacatacaagaagcccataagaagatgctctgaattaccataggatccagcaattccactcctaggtttagacccaaaaggactggaaacacgaacacatacaatggtgggtgcgaatatccgtggcaatgttattcataatagctaaaatatgaagacagccaaaatatctaagacccaatagctggaccagtaaaatgtaatgtggggaaaccacacaatgggaagttacttagccatgaaaggaataaagggggaacacataggacatcccagataaacatggagaatattatgctaattgaaacacaggcaaaaataaccacacaccagaagctactccttgtgtgaacttttcgtagaaaagaaaacagagggagagggcatgggagagaactttagtggttactgctggcttttctgttgtcgtttctgtttgttactgtttttgagaggtggaagaactgatctggaattggattgtggtgatggtggcacaagcttgtagataaaccacaagccactgatttcactgctgtaaaatgctgaattgtactggtgtaaaatgctacagccagtgagtagtattgtaataaaaattattattacaaagtattcaaaggctgctaagtcttctcaagcactgcacctgttttagttaaaactatgttgccttggaataactgtacttcccaacctttatctgaaattagttttaataattagctgattttagtattctgatgttaaattctaatagaagatttgaataaataggatttcttttcattctccctcaacagtccctgcatctacctctcaggagaaagtaataaacacttgggaaggccagccagtgcccgactatcagtttgagaacaccaacgtggttcctgagaacacaagaaagttttcatcccatgatgccaatccctatcctggtgttgtaaaacttcagaagaaaagcacagacaaaatcaacacccacagcagcttatttgggaggaaacatccccaaagggaacaaagaggtttctcagataaatgctgccttaaagggtgtacaaaggaagagctggccgttgcgtgtctcccgtatgttgattttaaaacaaataataaacgtcactggtaactgagatgtacaaaccatcgtagaaactatgctagcttaacaaatacttgctaagtctaatttaccactcatttattcttgaagtgatgcttgtaagttatgctagattgtgaactacattggagcagtgaacgaccataagagccatggacagtgccttatggtggtgacagacatcttggtatttagtgactcctttttgtcatatttttttccgacttttttatttgaattagaaacaggattgatttacatgacaatcccagttcccttctcccacccgtcctcccctaccacccccccaactaaaaccctacctatcacatatctttctgctccccctggatggtgaggccttccacagggtgtcatcagtgtctattgtatcctttgagataggacctaggcccacccctgtgtgtcttggctcagggagtattcctctatgtggattaggctcccaaagccaacacctatgcttgggataagtactgaacttctacaggaggtcccgtagatttctgaggtttcctcacagaaacccatgttcctggggtctggatcagtcccatgctggtatcccatctatcagtctgggaagcaagagttcctggatgttcaggtcagctgtttctgtgggtttcaccagcctggtctggacccctgtgctcttcactcatccttctctgcatctgggttccagttcagttcagttattagctgtgggtgtctgcttctacttccaccagccgctggatgaaggctataggatggcatataagtcagtcatcaatctcataatcaggggagggcacttaaggtagcctctcctccgttggaatcttgaaatttgcaggaaaatggatggatctagaagaaaccattctgagcaaggtaacccaatcgcaaaaagacaaacatggtatgtactcactcatatgcagattttagacatagagcaaaggattaccagcctacaacccacactgccaaagaagctaaaaaacaaggaggaccctaagagaaacatacatagtcccctagagaaggggagagggtcaagatctgctgagcaaattgggagaatgggaagaggggggagggagctatgagaatgagaaggggagaagaggagggatgcagaggtcatgagggagcagaaagggtgagtcagaggaagaatagatgataacaagaatggagataacataatagagggaaatatttttggtttacagagaaatcaggcactagggaaatgtctggagatctacaaaggtgacaccagctaacgatcgtcatatatatcttaaaggtgatgttactataagtgccacaatctatgcagacatttggaaattacctattcggggtttgtcattgtgactgaaaattcttaagctgcatttaaatggattatggaaccttataattctttctatataatacacatatttgtatccataactgctatgctcatttccataaactaaccagtttgtctcagcaacttgaagcaactaacattacctctcagagaagctattgtatggtaatagtagtggctacatttttagggcccggagttttattcatgctcttttcctgctgagccatctggccagccctgtgtgaaataattttaatgatacaaagttgagaaaaacttaatttgaagttttcagaatagaatcctttcccagtaattgatgggtaagtgtagcacaaataaaaaaaaaaaaaaaaccagagacagatattggggtccaggccaaagatcagaaaagcaaagcagccaagtcactagagagttctcacctctaccaagaacaagaccaaagggggaggggggaatgatcctgtcctcagagtaattgcagtgctttccaccaaaacctcagactgccctgagactgcactgagctcctaccttatattcttctctagtgctggtattgaaggtgtgatctttgtttctcttttagactgattcactctcgtgtatcccagggtggccttgaactcacagagatccatctgactctgtctcctgagtgctgggattaaaggtgtgaccaccactgcctgacctatatggctaactagtggcttaggtgtgtggccatctagtggttcagtgagtctaactagtggcttagctctatactctgatcttcaggcaagctttgttagcttacaaacaaaatatcactacaggtaagcgacatccaaaatcttctttagttttcttcccaagtgtgccctataatattatgctcagtggaatatttttattcctctttgactgctgtatgtcttagaacaaaacctcttttccacacaaatctacatttcctatgcatttgaaaaatgttttggttttctactgctttcagagtagagcctgcatttagttacttttgtgaatagagagaactaccaattttgatacaaatttatgtcatggttgaataggtccacaaagatttaggtgaaaatttacatttagatctggacaaaactttagatttgttaaggaaatgggtgttacagtagggagggacagagtggcccccatccctagcaatgctgtaagcaaaagaggaaaagaaaaggctcgccaaactgcagaggctcacagtctggcactggctaaatgttaaagaagggaggtctttgactcacacagcaagcagatactggagaagggcccctgcacttcccagcctgctcactggtgctgggtgaaggagaatcacttgaaaagaaatcttatagtcaaaatgctagctgggggagaaggaaaagggcacaagatctcctgagctaattgggagtttgtgcgggggggggggagttaggagaaagagaaggagagaagaggaggggaaaggacatgagggagcaggaagattgagttgggggtgaatagaggagagcaagaaaagagatatcataatagagggagccattataggtttaaacagaaacttggcactagggagatctccagagatctacaaggatgacaccaactggcaatctaagcaatagtgtacaggctaccttaaatgtccttctatgataatgagattcatgactaccttatatgccattctagagccttcattcagtaattgatggaagcagaagcagacacccaaagctaaacactgagcagaactcctggaatcaagttgcagagagggaggagtgatgagcaaaggggtcaagaccaggtgggagaaaaccacagaaacatctgacctgaacaagggggagctcatggaccccagactgataactgggaaaccagcataggactgacccagcccccctgaaactggatgttgatttggcggtctgggcaatctatgggacctcttgtagtggaccagtatttatccctagtacacaaatggactttgggagcccactacacatagagggttgctctctcagcctagacacatgagggagggtttaggccctactccaaatgatatgacagactgtgaagatccccacggaaggcctcatccgctggggagcagaaagggaatgggagaggaggtcagtatggggcaggaatggaggggagggagagggaacttggattaacatgtaaaacaaactttttctaatttaaatgaataaaaaaaagaacccagtggggaaaaatgctagctgagggaagcagaaattcctgaagtttttcaaaaaataattattttatttttaaaagtagcattcaaagtatatggtcatggttctatagaggaaaagaaacaatagtctgggttgctttgtttagcataacaattcacaaccttacacgttttcttgaaaatgttataattttatttttcttgatagttgaataaaattccattgtgtatatatatatgtaccacatttacttagtccattcacttgtcaatgaccacctaggccagctccacttcctagccacggtgaacagtgaaggtgtaagtatggaggtgcaagaatctctgagatgttgtctctgaatcctttagttatatacctaggagtgatatcactagctcacatggttgttgagtgatatcactggctcacatggttgttggttttgttgttgttgtttgtttgtttgtttccagacagggtctcactatggagtgctggctggcgtggaactcactctgtagaccagactggcttcaaattcatagatgtctgcctgattctgcctccccagtgctgggattaaagccatgcaccacctcacatactggttgttctttctaaaaaaatttttttgagaaacatccatattgatttccacagtggttgcatccatctatatttccactaatagtgaatccaggctcctctttacccacatccttgtgagtactcattgtcacttgcttttgtgacattagccattctggtaggaatgaaatagaatcacaatgtagttttacttagcattttcctaatggctaaagatgttgaacacctttaaaaactatttattgttcactttgtttcttcttttgagacatgtctagtagcctatttattgattcaaagatttgtgggtttgtggtgtttaaccattgcagtttgtatatctgtcaaagaagtatacagctgtgaagtttctcccttattatgtatgctgtcttttcactacactgctagtttctttgctgtgcaaacctttttaatttgccatgtatagattcttgggttattcactgtactaccactatccttttgcttatgcctgaatcttgatgtgttttctctagcagctacagtaattagggtttatagttaagtccttgatccatttggaactgatatttgtgaagagtgagagatatggatctaatttcattcttctgcatacaaatacccagttttctcagcaccatttgttgaaaaaggctgtattttttcccagtgtaagtttttgcacctttgttgaaaacagtgcttataggacttatttctgggttctttgttctgttccttggtatacgtgtctggtttgtgccagtgccatgctgtttttgttactgttgctctgtggtatgatttgacattaggcactgtgctatccaacagtgctcttttaactttgtgtttccatatgaatgtcagtttctccctagttctgtgaggaatgtttttgagattttgatggtgattgcattgaagtagcaactacttttgatactgttgccaccttcactatattaattctgtcaagccagaagcacagatatttccataatctagtgtcttcttcaattcccatttttagtaccttaaagatttcattgcagagatctttaacccctcccactagatttattcatgaatatctttatttttgtgaagcgattatgaatggatatttttcatttctttctgcaccaacttattgttggtgtatagaaaagccactggtctatatattattgttttgagtcatgcaacttttcctggggacatttaccagatcttagacttaccttgtggagacgataaattcttttaagtttagtataatgacataaacaaatagacactatttaattttgttcctttcctatttatatcctttttatttctttctctggtcttatttgttctagctaagacttcaagtactacaatgaataccagttgggggaagatttgtctcattccagattttaaaggaaatgttttttgtgttctctaattttatataatattaggtatacattatatagaactttgattgtgttgagatatatttattcaatttctaatttcttttggacttccaccaagaaggaatgttgagctttgtcaagaccctttcttcatctattgagaggatcaagtgatttctgttcttaagtctacttatatattgcatttactgatttgcatatgttcaacaaaaccttgtccctcagattaaaacaacttggacatgatttaggctcttcttactgtagtcctgaaatcaatttgcctgtatgttttattgagaagcttgtgtgtgtgttcatcagggagattgccctatagttctttttgtgttgttttatctacttttggcactcttggctgtttcctaggaaagtcctagctttgaagaatgagtttggtagtgttttttactttctattttatggaatagtttgcttggaaattatttgtactaggtctcttttaaaagcttgttgaaattagcactgaatgttcagtttgggacttccctttgaagtgacacttaattactctttggtcccataacaagcattgtgaatttgggtaactcatatatgtttgagaatttattgatttttctagattttccagtatgttagaaagtaaattttccttagtgatcttccttatttccttacagttcattgtgcaacttcattttcatctccaattccattttgtcttttgattcgtttgaccagggggttgtcaatcttgtttctctcttcaagacataaatttgtctaggcattgttctgttaatctgtttccttaatttctgctctgacttttatctcactggatgctgcatttgggcttggcttcttcctcttctagaattttgaggtgtgtcactgagttgaactttctctgacttcttttaaaatgtgagtacttagaaaacttcctcttacaacttttttggtgggttgtgctgatttgtatccgaattgaagaatttaaaaatctccactattcataagaatctgtactatttgatcttcatatatttgtgtagtttctgtgttttctcttgctgttaataccttgttttattctaccattgcatgctaagatagaaggaattatttttaattgctttgcattcgtacaggctgtcttcatagtcagtcatgattgactttagagaaagttctattaccactgagaacctatagtacctatctgttatatgaaatattctgtaaatctctgttaaatccagtttatttgtggtatagtttatatctttgccagattttagtttaggagacctatccaaaggtgagaatggcaaccaaaatattcaatcgtacctggacatacctgatttttcatgccttttagtgtttgttttatgaaactagaaactacaaggtttggttacatcaatacaaattctcatatctttttgataacttgttccatttttaaaaaaatacatatatattgttcttctctcttctaattagttttcgttcaaaatctacttcatcagatgtgagagttgtattagcttgcttatggcttctgtttgctttgtagattgctttccatacacttagtttttcttatcttggacagtaagatgtctttgagatgacacatagttggatcttgtcttttaatgtggtattcattttttagttgataagttgaagccatttgcacttactgttatttttagaagggtctgctatttcctatggttttgttggctgctgttctggctggttgggttcttgataattcttcccttcctatcctattagtattgaaatttttctgtgtgttggaaatgatgagctcctcccagctcctctgatcatctattcctctcatgaaatctatttttttctgtgttctcatggatgagactttgtgtttcttttcgtataatattcatttcttaagtattttctgtagtgctggcatggctgtcatgaattgccttaatctatattttcaaatgtttgtatttctacatcaatttttttgatgcaaactgcaggaggctttattatagttgtttaatgagctaacccccatgttagcttgggtctttcatccacccatcatggcagatggctaggaaagacagctcgaagcatctgcatagagatcttatagggcagcgtaaggggagtgtctaggggtatgcacagactcaggattggtgtggctccaggcttggagggtttgccctgtgttgattggtcaactggttgttatggcccataggccctcccagggtggttgctatgctctgcgagtcattgctgtgcacttgtccgaaaagcacacccagagccataaaacatagcaccaccagctaacttctgattggttccttgccatgaggcaggcatctgacctcctagtgaccaaggcaaggtcagacaagcacatgttcggctgttatggctgccaaaatggggagctggtcccttcattcccccattttcttttttggagatttcaatcatggaattgctgtctctccagcatcaccatcagggagtgagagatattggcgtccccatgcaagggagttcctactgacttagcatttcaaccagggaaaatgggcaatgtattctttcccaagctacttcctcctgactttgggatgaagttagggacccaagaaggctgaaatgctagtcaaaagcaaaaaaaaaaaaaaaaaaaaaaaaagggaatttaggcaatggggaatccatcaggagcttctggttggcagactctgttgcagagacagggggtgtccacatcagctggactggttcacatccacagcaagtccagggctcgaagtctacttaggaacagcctgtagtcagcaactgatatactcagatgtgtctgccagaagcagaaacctgtttaagatatgtttaaattaggaacagacattaaaacttatttactaaagcccacagtgcagaaaaagcagctatctagatctgttcaaacagcaggaacatatttataattttgagcctagcaaaaactacagatttgggctagaagcatatacatttttcttctgtccagagaaccaggtatggattggacagaggtgcctttggcctgatgaaaagccccttaagtttatatttagatgacaaccagaataaacctaaaaaccttgagtttgtgcctgaacagtaaatagtgattagtttatcagataacatgctgactatagttagtctataatggatctgactgcctgatgctgtcaagctgacaaccattaatatttcagagatctgagaagggtatattttatacagtttctgaatctattaaaaagcaacagaagccagttagaagccagtccatatacagttagccatacccaagtctctccattagcattggaggcagaagtatcaaagaacagcaatcttcgccaggcctataaggtgagtttttttttttttctctctctctctgtggaagatggacatggaatagactgaccttgttttgtctaggcacaggggtacaatcaattttccagtgtccagaagctttgtccacagtcttggccaggttctggcaggcagctaatgtcacatttgagcatcttgctcactggtcagcatcgtcatcatccaggtgcaagaactggggtgcctcataatcttctttggagactttgggttactgtcaggatctggcagtctgatattataaacttttaaaacaccattttaaatgccattctgcaggtctctgaagcattagagatctgtctgtctgttttagttacttgccttaagcatacattaagcacacaggtggctacctaaggtcttatttctgtaattgattaattttcagtctgactataactggttttaacttagtaaaatatttgaaacttagcacagtgaatctaaaactgcatagagttaccttatattccttaaacagtagctacacattttagctgcttgcttaaacttttttctgagacagggtttctctgtggctttggagcctgtcctggaattccctcggtcgaccaggctggccttgaactctgcctacctctgcctcccgagtgctgggattaaaggtgttcgccaccaacaccctaaacttaacttctgaaaacataaactgtaacatcttataatagattagcagcttttataaaaaaagaactttacattgtcaggctttgcttaaaaatgattctaaattgaagctctttgagtacaaacattaataaaaaagacatttaaaaaatataaacatttaaaaagctagttttaaaaagaaatttaaaatcccttaatgtctttctgtaatatatagacacattaacattttaaatcttaactgaaaaacttgtttctaagatggtacctctaatttccatgcagtcatctttagtcaagatggtggttcgagtatcttttttcaacttcagcaaaatggctaccagtcagccatgtgaccagcttgccatgtcgctggctacaaaatggcggtgacctgcaccatttgttttagctgtaacagaacttaggttataccaggaaacagaacattttaaaacaagcatacataattttcttgagaaacaaacagaacttttaaaacagaattaacttaatatggttaaaattttaacttatattaccaaattttaaaatttactatttgtagacatgagaaaccataacagtttacattttctctgacttttcacaaccttttctctgacctttgacaactttcctctgaccttctatgacttgctttaaccctctataattttttatcattcctctgatttccttagacattcttagacaaatttctctttccctttttctctttattactttagtctcctacattttctctcatttctcagtcaacataaaaactcttatcaaagtcccttttatagtttttaataactttaaggcggtttctttagaatgtccagaacaggccagatggttcacctgccccagctccatgtgctcagggcagagacctggggggagggggggtgtgctggcaatcccagaccctctgccaattcaggggtgggaaaaagaccccaggtttccctgcataccacgtgtgtggagcacagagaaggccaggcagccaggcaaacagtggccttgcaagccatgtgctcagggcagggaaactcccgccacaagccaggacccatggcaggatggcagttggggcagagagagccccacttcgcatgtctcacagaccggcaggtgaggatggaaagacagactcatctgcgctggccaggctcagctgtgagggccacagcaatggttggagttcagagcagtagcctcaggggactctgccgcagcacactctaacccatggcacatggcagaggaactcctgtcccgcacgccacgtgctcagggcaagaaaagacccctgacccatgcatgccacgtgcgtgggcatgagggccagaaagagatgtttaacaagcacacagtacaaatgtgaaacttggacagacagcacagtaacacagactagggtcctatttggaatttcagatggctagccccatggagatcaacttggtccaaaaccaagtctccctacagattggcagcctgcctgggttcccttacagatggaatggcaacttgctcccagcaagtccctgtcctacagattgggcgattttgggtccccaaaatctttatccctactgactaagtttcatagttctggaaggtgatatccatgctaccagaaaaaagaatcatcagtctcaccccactgtgaatcctacaaactataaaaacaactggcctgacaagataagcccactggtacattagtggtacaaaagttatgggagcaaccacttcctggttggaactaagttccactccatgagacagaactccttaatggcacactaatggtaccaagaacatgtggttagataggtcttaggtcctagtagggaacctactactactattctgctaaagggacatagtattaaaatgacttctaataatttttgttacctgcacagaacagtacatctctcggacctcttcagaaaagtttcttcttactatagacaacagtaacatagaaaccaccaactgctcaatatgcacagaataagagaatgttgagtgatcaaccctaaatgagatgtatgcatcactccctcaccctcaaggctcaggggactatgcagtagaggggttggagagatttttaagagccagaaatggaaggcgattttaagaaaagtgttctcccaaacacagtaggtcagtggcacctatgaactcacagtaatttttaaagcttgcacaagctcaggcctgacaaaatcctggcagaggtggggatgatattttcactactagatgagaagccacgacatttgataactactgagagaggaagagtcaactttctttaatgatgtggccactggcaggccaagcacatccattgcaggccctattcccaaatgtatttgggcaacacaaactgtacttgattgaggaaaggtgggtaaagggaggcttggggtgaagagaatcaaaatacattgtataaagttctcaattagtaaaatatttttcaaaatcacaacataggatctggagagattgctcagtggttaagaccatttgctgcccttacagagaatccaggttcggttcccagttcccacatgtcaacacacgactgtctataactccagttctaggggacatgactccctcttccttcccctgggggcaccagggacatgtggtacatgcatatgtaggcaaatactcatacacataaaaataatcataaaaaacaataggtggcgaaaaagcccttgtcaaaattcaacatcttttcataataaaagtcccaaagaaaccagaaacagagctatcatgccttactatgaaaggcaatatatttatagtttatacagggagaaactgccagcactttctctaaaatcagaaataagacaaggcatcagttcccactcctattctagagtaaagcttataatactcaagcacttagccagcagaataaagagatagaaataatacagtagtaacagggatagaaataaaataccctgtgtgcagaatatatgatcaaaacagatttcatcaagaaccttatctctaataaacaattcagcaagacataaaattaacacataaaagtcagcagtttctcatacacaagtaagaaatttgcttaaaaaataattcggccaccaatctccttttaataccctcaaaaactaaactaaacaaaccttatcaaagatattaaagtcctttacaattaaaactataaggattgtagaaattaagaaaatagtagagtttattatgttcatggagcttaagaattattgtgaaaactgacaaattaccaaatgtgatctacagagtcaatgcaatcttccttcaccaaatactggagatgttacaatacctaattccaaattataccagagacagtaacagcactctgatctttaagaaagttagcgctgggtgatgacggtgcacgcctttagtcccagcacttgggaggcagaggcagaggcaggtggatctctgtgagtttgagaccagcctggtctacaagagctagttccaggacagcttccaaagtcatagagaaaccctgtctgaaaaaaaacaaaacaaaaagttagcaaaagcatgggggggggggagattcttcaactcaggtgctgataaaactagatacccaggagtaaaactatgaaaacaaatccctttttctaagctgcacaagtcaattcaaaataattcagagacagtctacagagtaggagaaaatctttgtcagctatttgatgagattaatatccaagacaactaaaaaaaataaacaccagaaaacaaattatccagtcaataattatccaggtagattaaccaaatagacagttctcacaacataaagtacaaatggccaatgtatacactggaaagaaaattcaacacctgaagtcataaggtaagggcaatcaaattcaaaactatagtgctccatcactgtgatataccactgcccaataaaaacttaaattaaataaaaaataccattcatttaattttttggtgaaaaacatttccatctatatgtacaactgtggttggttgggtgactacataaaggaaaatataatacttttgtagcaatcttccaattttgtgggaacatgctaatagtccaaagaagtaattaatattctaacacgtggaacatatggctaaccccagggaggatggctccccagatatagaaatctaggtatttcctcatctctattacttaataaagtttaggtgatactttgtttgtgctttaacaaataaagctcgtctgaagatcagagtgtggagctagccactaggtagccatagaggccaggcagtggtggcacacacctttaatctcagtacttgggagtcacatgtttttaatcccaaccctaggagggtggagacaagagtgataaggccgagcagagagaggaatacaaggcgggaggtgacgggagctcatggcattcagtctgaggatttgtagggacaagatcacccctttggtctgaggattcagtagagataagaggtctctcttgtggctggttcccttacttctctgatgtttcagtatttaccccaatatctaactctggatttttattattaagatctattagaattcgtgttacacttaatttatcagaagttacagctgtaaaaattttcacttaactttaaagctgaaaccctgggctgtaatcagggtactcctccagagtaaagtttgtgcaactagcagcatatacaaatagcatagagacataactatcttctaaagcaagtacccatgataatatggaattatttacttaatgattatagaacagccccatcaaatatttatgtaactatagaaacctgaggaaactttttttttaatttctaagaaatagtaacttgaagaaacattttactgtaactgatatttgttcctcatgtggaaccaagtagctaagtatgggagtactttctttatatgtatgatggggggaggtgggggtcgggaaggaggggagggaggaagaggaatctgggattaacttgtgaagcaaggttatttctaatttaaataaaaaaacacaaaaagtctaaaaaatttttttaaaaaatatgaactctcaatgaaaatgaatcctcttaactaacaattttacagtaagattgccatcacattctacaatattaagaaaatgtataggggattctttaaaggtcaaaattcaaatattgttttaaaagcttaacataatgtagtttctatcactatttttttaaaaaaagcaaaatatggacctttatgaaaaatctgttaaattttactataaaaattctaaatcaaccatattataagatatatcactttcatctgaagagctgcagaattgatatcaactgtattacatatgtaagttcttgagatgtccttaaaaattacataaaatatatataacttccattaaaatattaggattttaaaaaaacaaagcctattagtctcaccaccatagatggtttctgtatctggtaactactacaatgcctaaaataatgtgaggagcatttcctgctatccttcttcagcaaaacaaacaagttaaaacatagtatacaccactggaaatagagaattttttaaataaattaccaaatatttaaaatcttgtataaataacacacaaaatctttatttttgacatgacattgtctaaaatggagcagcactaaagtagataacaattactcatactttgaaaatatgtatggtctctcctcttgtaaagatgtacattacaaattttctggcgttcttgaacagaatgagcaagcacctgctccctgacttctcccttccttcctatccacgtgggagactttgatgaagggacatttctcctaccactgaatagcaagcatggaaaaccctcacacagtctttggccatattctcacccattatgcatcataaagagtttgtacattttacaaattatttatggcttatgcttcaatttaatatataatgacaggttttaggaatttcaatgtcttgttggcagttaacagtttaagagaggaaagtatttctggcatttttaatctcaaaaaatataaaagaatactattcactatagtcatagaaaaagttggagacagttctacataaaaacacatttaccataaacagacacaaggaaaacaaataagaaaatagattgtgctatgtctttgtaagattgttccatttcaaaattctttagggttagggagatttcctatacaaataaaactagacttttgttcctttgctttgaaaaatatttacagtgatatggaactataagccctgacacagcagcatagaagagcaacaaagaaaaggtatttattcaattttctgagcattttaatttgtatcatgaagttactatagatcaactatggaaaaattagaaaacattaataaacaccagccctcgtgtaaatcacacaagatgccaaagtattgtacactccacatggtaaaaactgtacaagtacattctgtgtgtctctaacactgcaaaatttacattataagtgtttcattttttcaaaatgctgagttgaaaatgtctattttcttcttttgccggaggaggagatgcaatgactgcacagtgagctcacgcagctcttcacaagcatcttgcaagactttttagctgtgtcttttacagatggtgcatggaaaagaatccacaaaatttccaaagttctgagcagacagcctcacactttcttctggctagcattataaggatgtgtggataagggtccatgacaatgtggctacagagctttgctctgattctggaagtctacttggtctctgagtaaaggccatctcattcacgcagccaaactgtcccggatttgatccacccgaagtgctaggtccctgaaagagggtcgctgattgacattgttgttccagcattctgtcatgatcatgtaaatctagttaagtgaaaaagttaaattagaatgaacacaaagtatcatgctaatgaaaggatgatatgaatatggaaatctcagctaatgtacctaaaccagtaataatgctatggttatgctttgaaacacatcatttgtatatactttcaataaaacaaaaaagaaaatggataattactgtgtattaaaaaaattgttgttgggctggagagatggctcagaggttaagagcactggctgctcttccagaggtcttgagttcagttcccagcaaccacatggtggctcacaaccatccattatgaaatttggtgccctcttctagtgtgcagatatacatggaagcagaatgctgtatatataataaataaataaataaataaataaataaataaaattgttggatcagggagatggctcagtgatttaaaaaaaataaaaacaaaaaataaaaacggacatggaagcctgataaccaagagtcaatccctttgttatcagggataacacaaaagccaggcacaacagcactcatctttaattccagtactcctacaacagaacaaaaggcagagacaagaaaatcaccagggaaatagtgaggaccaagcagcctggagtgcacagtgcagcatgagaaacaacacagagacaacagcaggaaagcaagaaccaagccgggaaagctttcctttgctctcaatgggcactgggatatgtgtgcctgcacacacacacacacacacacacacacacacacacacacacacacacacacaccacacacacacacacacacacacatacatacacacacacacaacacacacacacacacacatacatacacacacacacacacacacacacacacacacacacatacacacacacacacatacatacacacacacacacacacacacacacacacacacacacacacacacacaccatacacacacacacacacacacacatacacacacacacacatacatacacatacacacacacacacacacacacacacacacacacacacacacacaccatacacacacacacactcacacacacacacacaaacagacacacacaccatacatacacacacacacacacaccatacatacacacaaaaaaatcaatgaattaagaatcattacctcatccgggcacccctctggtctcggtaatcttccattattcttcagaagctctatcaaatggaacacaatcatctgtccttgtttatcattgccaatcattcgcataaattcctgaaatataaacccattttaatgacttgataaataaacatattatactaacaacagaaatgcaaattaagataaaagagatataaccatttttatattaagttggtataatttcattgaaaatataatggtgaatacagcaaactactcatgcctaactgtaactactgtgaagatataacctgatatatcttttcctctgaaacgattaaaagcgacttactaactcataatgtctgacaactacacttttcttctaacatgacagccagaagtaaaactacacatgataaaaaaatgcagacgattattcagaaatatgcaactgtatgacagaatactattgggcacttaaaatcatattttcagtaagtaattactgataaagtaaaataaatacacacaatgtaataattaataggatagaaaagtacataggaaaatgtcacagtattaaaatggttaactgagtaatttcattaagatgattttttatttttttcatactttcatatattaaaagaagcctataatgaacagtagaggttacttccaaaagtttgttttaggttgtgtgatgctcccagagtacaggtgcatactcactgtacttaaagccattgagaggggtcctggaggcctggtccctggcagtgctggaatggaggactctatgagagatcaatgctagtctccctgggtattctagttcctgtgagaacaagctgcttcacaggaagaggaatcctggccctcatggctctccatctcaagccttgacatggcatcttttctgcttatttgccatgttgtgatgaacccaaagggtcattgcttgaaactggcctttcaatcaactgtgagctacataagcccttttctttgtgaagtactcagtgccaaatattttgttacagtcacagagacatggccaagagaatacactgaatttagtaagtttatggtattgttgaatattgtctccaaataaaaagaagagattctagaataggccctaggtatgttattcttctttgcataatgccttcttgtgcttaaaacaaaagttgatcaatagaaagagcctggggggcagttaaacaattaaaaagcacactgaccactggtggacttttactcttctcaatgtatgtgaaaagctcatacagaactacgccaaagctccacacatccgaggcaacagaaaacttgctctctgtcagggattctggagcatacctgcaatagatggaaatcatttaaaagatgagttatttgatgtaacaactcatcatactgaaggagaaaaaagcaaatgacaaactctcccaggggatacagaaaggcatccacgtacacggcaagctgggctcctttgcaatgctgagtcttggctggcactgggaacttaaatttcaggagtggggcgtggcttaccatgctatttacacaagcaatgtgacttatttgggtatgtgcttatcttcttggagtttgggatttttttatagaccaggcagatagtgcctatgaaactacttaccgcaaagcccctgacccctgaggttctaccacacttccctgatagacattatatacacactgctgtcttcactgctgaagggatagggcctttgcaagcttgtgatttgctccacagagctttccagtgctgcttttgctatgctgtttttctctgtgatgagtatgataaatgttgagtggtgggtacccctgacaaatcagaaaacctggtaccaaattcacacaaggagccgataaccagattggctttctgagaaggccaattccagatgcctccaagacctggtctgaaccctagagagggtgagcccctctcctccttgctgtttatcctacccctctatgtacctgtgaccatgcccaaatgggtgtggtgagcagtacaggtatccagggtctctccctacaagactcccttaatataggtgacaatggtgtgactgggacaatatatgaggccagtgcagtgggtccaagatcaaacactaatgcacaaactgatttagtggagtccattctatatggagagataccttgctcagcctagacacaagggtgtggggggtggagaggtgccttggtcttgcctcaatgagatgatgggacaaatttattagacttcctaggggaggtcttactctctttgaggagcagatgcgaggggggggcattgggggagcaggaggagaggagggagggggaactgaaactgcaatgtaaaaatatattttaaaaaatttaaaaacatactcataataccattataacttactcttatgtgaaataatttatttcaaaatttttaaactatggttctttctgaactaacagcaactgggatgatccatgaatttatagcaagttgatctatatattttaaagaacttgatgaatcttaggaagtatttataaactgacagttgtactgtttatattactctttctaaatttcaggtcagacatcaaattatatttaatgaaaattttaaatatcatcctttaatatttgattctaacagcattattttaatagtattacttcagcagacaaataaacaagaaagtttttttgtaaacatataaaaaccacgacaagctcaccatggcattcctagaacacaaaatgcttcctaaatgaacacattgaaactgcatcagccagggtggtagcacacaccttttatctctaaactccagaggtagaatttgaaaccagtgcagtttatataacaagttctaggccagcaaaggatacacagtgagacccagtctcaaaaacaactcccctaagggaaaaaaaaaaaaaaaaaaacgaacaaaaaaacccaaaccacaccaaacaaacaaacaaaccaaaaccacaaaacttttcaccaaagtacatttcaatggaaccaatagtatctatctaacacataaaaaacaaggtatgcagaacagcatgttaagatcttacacctgataccacacaccatggtgacagaacatgtcagaaagtattttccaggtagctgtgggataattgtcatagcctgtgtgcaaccatattgatcagccagacaaagtatgtttactagtgcagcagtgtcaactccatacaggtacaattaactgttctcctaaactcatagcagctgtgattatatgcataaaactgggcctgccaatattctatcattagagtagaggggagcttatagggtcccaccccttcatgatatttatattcagttactaattccaaatgtctgaaagaggtgttttcttaagcggtgtagctgtgggaaagtataagcacttgccaatgctcccataagcaagcctaattcaattccctgggtcactgcaaaaaagaagcagctgaccccataatggcagctagctgggaataggaaacaggtcaatgggaatgagatcaaggcaaaagagagtcaaggtgattgaaaatgctccatgaatgtatgaaaaatgttatgaaatctattgttgtaattaatacatgttaataaaatatttaactgtttctgcgggtttctgcagcactgtcttggctcctttgctcatccctcctccctctccacaattggattccaggggtatggttcagtgcttagctgtgggtgcctgtttctgcttcaaacagctactggatgaaggccctaggaatggtaaccaaggtagacaccaatctcattataggggaaggacatcaatggcattttctccaccactgcttggattcttagttggggtcatccctgtggatcctctaacatttcccctgtgccagacctctctccaaacctgtactgtctccctctatcaagcctagtgagagcatggagaccctagtcataaagctggggaaacagcattggactgaaccaagccctttgaatgtgggtggcagctaggaggccaagacagtctatgggacctctaacagtggagccagtctttatccctagagcacaaatggactttgggagcccactccctatgggaggatactattgcagcccagatacagctgggctcccccaaacaatatgacagactttgaaggtccctggtggagggcctctctctccttggggaggttgggggatgggttgggcagggttggtggggaacatggggggatgggagggtggggggatggatatgtaaatatgagtagtaattaaagaatttaaataaaataaaatatataaataagtaaaatgagttatgaatgttcctgacaactttaattaaaaataaaaaattacttctaactccaaatttacaaatccagtatttaattaatgccagattataacataatcacggtttagaaagtttaaaagtgcaaattcaaggatcaaactgagtttgaatcccaaagctataatttatcagtaaagacaccttgggcaagttattaaacttatatttatagttaagtctcctcctgcttaaaatggagctacaggtagaacagaccttataagaaatgtctgagaacagaagtgcttcaggttttagaagttttcagattaggggacataaatgcccatcagttaagcttccctactccaaatctgaagcgctgaatatttttcagtgcctaatgtgcttcaggcttcagtgcatttgattttgggtttttcaggctaggactgttggatctgtagtaatcataatactacagatattctacataatattctccatgggttgtaataaatattcctgagaggttggaaagatggctaagcagctgagaacacataccactcttccagatgacccaagttcaattcccagcacctccatcagctcacaaccacctgctgttttgttagaaaacattattggagataatacatgaaatatatttaacccaacacaaagcatatgataaatattgctgttacaagaagtagtgctaaactgaatgttattaaatattatatattaaataataataaaaataaagtttgaagcaagttctctaaaatttcactttattatactgaaaaatgcttactcaccagaatatgggactttcacctggttcttttactttgtagtattctttgtcctgtggcaagactttggttaatccaaaatctcctattttaactctgttctcattttctaccagtatgtttcttgttgccagatccctgtggatatacctttttgtaccaagatactccatgccctatggataaaatacattttttctttcagtagttatatgaacataatttacatgactgtattctacaagttttctgtattagttaaggacaagttttatgacttttgagttagttcaccatgtttactgctcccataacagacatttaggatgttaggtaccttgcatatctgagatgtgtactgcagaagttttttgtgatctatccgttctttatgtttttggagatagtctcgtaaacttccatatggcaaatattccataattaatcttaggttgcgtcgaccttttaatatacaaaaagaacacaatagtttatcatgatatatcttactgattaaatactagcaaaaaactacatgtaaattatttaagtatataccaaatctgggtccatgatgataaaattttattaaaaatttaagatgatatggtatttaagaatacaggcttttcaatacaaaagtttttgaaagaagcatcagaaatatttattctttagcctcttttaataatttgtgaaaatccaaataagttgataatttttctcaactgtaaaaagtatctaattcaaaaacattttaatagactacataaggaaattaattttgtttttaaaaaagttgacatatttttaagaagtggtgagaaaacactgaagtagttatagtccatgatctcccgcacactctccaagcatctctctctctgtgcactgacaaatctttgacaactgtatgtttctaccacccaggatgtgaaagacatactgtgaagttaaggcaggtttcaatgggcaacataccagcactgtagcacactcccttgtactttacaatgttgtcatgctgcaaggatttcaggatttcaatttccctttcaaagtctctgagatgctcttcagtgctgtgctggagctttttaacagccaccacctccccagtgttgtcctgtagagggtcatatcggcacatctccacactcccaaaattaccctaaacaacatgtgacattaggatggaagccaaaagccttcaaaacaacttactattgacttctaagtatacaggaagtacatggaagctagaattagtaggaagaattcttggtttatgttagagaacttttgacgaaagaaatggaagtgttattttaaaaactgggcagtatacctataaacaacttctttgagatgaattacaggctgaaaaattatagactgaattatagactattcctttatctcactttctctcagtgcaccttgatattgctatcagtgaataggaattgctatggactgagcaaatttctacaaggaggcctaatccctactatgattgtatttggagtatacttatacagagtgataagatgaaatggccacaaaggtggtaccctctgccagaactctgaccctccacttttcagcccctagaactgtgaataaatgcctgttaaggtcatccagtcagaacatggtacttttcattatacagacaaatacaaactaatagagtctgcttgacttaagaatggagagatgaccccatggttaagagcactggctgttctttcagaggacctgggttcaattcccagcacccatatggcagctcccaaccagttctaggggatccgacgccaatgcacataaaataaagttaaataaattaaaaaatagtgactagagatgatattcctacactaaagaaaaatgcagtctttaaaaaagtacactttttacggctattaggcttcaatgtgggtcttttaacaatggggaaatgattggtttaaggatataaaactgcagttggacaagaggcatggactctgtgaagtgttgaggtctactgagagcatgataaatatggttgataacaatatgctatattttaaaagttgtgagatagtatactttaagtgttctcaaaacaaaaatgatgattatgtgtgatataacatgttaattggtttaatttagccatgccattgtgaacatactgtattctgtatcataattgtgcatgactttatttatgaactaaataaatgaatgaaaaaagtgcactttttctctttccttaggctgcattacaccttgcccgccactccccatgtcatgtctatcctccaaacctagcccagctggcacatcctgtggcctagcccagcctggtgagtgtagctcacacccctcatcaaagcagcttctttgtgtagtgccaggagactactgaagcccacaactagtcataaattagacaactcgctgtgggtgcccatccacaaccctactcctgtagccaaggcccagagaacatgggggtgggaggggctgtctgagagccagaagtccaggaagtcagctctgagattgtgaatgacagggatgctacacccatgaaatcttaaccatatggtcacctaaacaaagtctgaacaatttcaacaccagttgacatccccccccaaaattaaacagatcacaaacataaataattacaactttgacatctgtttcaatttgtgtcctataaaaattcttaagagactacgatcactggagggttagatactcatcacccttctttgtaattctgtttgctgaccacttcttttcactattctaacagtggccagtgaaacatgtggcacataagaggagctctaatattcgtgtaatatcaaaaccacatgatttcagaaaaactcaatctgaaagtaagtaagacccttccaagcctgcatggttcctaatatgcccactaaattttcttctacctagaaaatggaaataagcttttttttttccttttcagattgttatagtgtaattattaaaatatgcattcatggtatacacagtgatgatttgatgattacacacacacacacacacacacacacacacacacagttataaaatgttcactatggtcaagctaattaaaacaaaaggccttcatcacacaaatgctcaggcatccatgctcttcataaacttagaagagatggaagcataaaagggaatcaagcccagtgaggcactgcacacctttgatcacagattcttagaatgctgaggcaggaggatctcaggttcaaggctagtacagataactaaggaggtccttatctcaaaataaaaaggagtttagggtataacttagagatagagtagttgcctagcacaggtgagaccctgagtttaatccccaggatagtaaagtaaagggagagggagggaggaggaagggggggaggaggaaggggggaagatggatattagctgaagacaccattagcaactgaagctaataaaattttactagatttctttaacttcaaataaattaatttcccaccccccaaagtgttacatattaccaagagaattctttaagggggattataatatccactgaaaactgtatctaagggcttgaaaaatcagtttgtttgggtcttttaaggttttcattattctcttcccactaattatattcaataagttaatgaccattaattatggtcataaaatatttatatataacaaacaacaaactgagatggattcaatggaagtgcggggatgagtcatactaacttttcccttttccataaatgggtctttgctatgtgaccatgctgaaatctctgggaataaaaggcatacttttttttttaacttaatggcatatgatttaaaaccaaagactatagaagatgatgtaactgaagtacattcacacaaaagcaaacacatgcgtgtgatagtagaaagagcatggagtcaagctcttatctcacaactgcctctatcttgctatgtgactacagaccaggtgtttaaatttcctacacttcatttttttcattgtaaaaatgaagaaattaattttatatttaaagtataatttcctagactttgcaaagaatactttctttgttatgccaataggcaacagaggaagagaaaataaaaagacttctatgatctaagaaattttggacatacactgcagtattaccaaaaaatgaccaatattgcaagaaaaatgaaacattatatgggattatgctataaaaacatggcctccaccttgggtgtatgctctcagctaccactttgcaagtcagccctgtagaaaggtccttgtaagtttggaaggaggcctgcaacagccatgttaatgagctagggatgagaacttctagtgaagccttcagagggaacttcaaggcctagctgactccttaatccaaagcaacccaggtaaactaactcaaagaaactggtaggttttaaggtaattttctgcataacaatagataatgaatattaccactacctagactttttttactcaaatgctatatcccttcaaatattccaaagagtattttagataaaaagggacaatagttattaatatagttaggctaattttaatataaccatcaatgtttagttttaaggaagctcaactggagcttctaatataggtccaagtctcagtgaggcctttatgttttatcggtggccaaatccaattcatagtgagatatggtatagatccctgtaaacaaacaagagagaccttactacaacaatagagcctgctaagcactgagtcctttttcatcttgtttgttatagaggctatgtgtgactgtgaagctttttaatggaacctctgctaatgaacatggtaattcaagatcctaagctgtaagcaatcagattatctcccacaagatatgtcagaaaggcagacagagcactaagtgttcccttctctattgcactaattaacccttcaaagcaagagacctagaataaatcagtctgggaagtactcctgagtttatcacccatcctcttaaaagacgttgactgtgattgcatgttaaaggaccaaaggtattcttcagcaaagtgtttatttaatggaaaaattctctaatacccaacaactaagcttttttttccacaaataccacttaaaattcatgtggaaagtggattcagcagctctagtccaaagtctttttgctcccaaataaaatgatatatcattatattgtatttgaaaatgtattgaccgtttaccttgccaagttgctgtagaaatttcaagtgtctctcttcaaactgtgtagggtctctgtcttcaaaagcaccagaaaatcctagggcacctattctcatgtttggcagcatgtcattttctgttagtagttcatagtctgtagaaacaagttggcaaatacattctctgagtaaaactgatagatactcaagctaagaagtagaatgagtttaaaatacgaaataatacagggaaactcaaaattatttacattatactattgttaattattaactcagactttcaagatagattttcaaggggtaaattactctaaaataggtagtttcagtatttacaaaatgagattctattccaattcctgaggttagaaggtgtggtgctgactaactatcaagcatacatttacctcagcattctaaaggaggtgggggaaaacaaaaataaatctatctcatgttttaaaaaataagtcaattacaaaatagatgggaactagaaaagccagaaggagtgttgttaaaaacttcatgcagccaaataacaaatgtgatcaaataagcatgcttctcattaactgacaaactaaatgtctttggactctaaaactctatgacattcacagacaataatttatggttaagttttcttgttcaaaaaataaacaaataaaattaggttatggaaggagaaaagatcattttaaaaaataaggtctgcccagtcaagcagaacatatatagcacaaggactcacacaaatgtaagaaacaaaaaggcctgaaagacatcaaagactttcttagatgggattgcaaaattagaaattatctaataaaaacaacagaggtagaaaacagtgaccaatgagatagccccatcagtactaacctggggtaaacaggctgttaagatcacggataatggctctaaaggcaggcctgaaatctggttcataatccatgcaattgttaataaggtttgctaattctgtccacttaggtgcaggaagctgatgcttatcttcataaaactgcagcttctgtaattaaagaaccaaatgctaagaatgaattctatagtgctgttatttaccttctttccacaattagatggactaggaaatatcacaccatgtaaaagaagcctgaagaaccagaatgtacctccattctgaatgaacttactctttgagagtccagagcattcaggggcttgtctcctccactgcagatttcccacagagtggtgccaaaactccatttgtctgttgccagatttagatttttaggattttcaatgcattcaggtggtacccatggtattctctcctgaagaacttttaaataacaggaacaaactatagttaaataagctctacaaactattgttttatgtgaatagttttcaaacttatttgaatgattaagtcttttgtggtggtagaggaatgtctggctcatgtttgctaagtttaagagctggatgatccttgaaatcctacttcagtatccagctttagcaactaagatctacaaagactgaacaattttcccatgtttatacaactttgaacagtgttgttggaattagtatcctgtgtaatgaatttctgatcaactaaatttctttcaattaaaccaaaatgtctcacctggcataccaatttcattacgttcccattagtcctgtttctctctcacagaaagaaatatacaaaatgtgccttaaaattgacgctcaatatttaaaaagaatatttacagcataaaagtgatacaagtaatgttacatcatcgatgggtgttttcaacaagttaggagcacaggccactatgaaaaggcccaacaggcatcattacagcagacagacaattaaattacaccaagacagtcttagcatagaactgacggactggttaatattcaggtcatgctatcctggactccacgacaaagaacacatctgaggaaggggcaggagtaactctcccttctgggatttggacacagagaatgaggacaatattacaccttttggcaaaacattatgggtattttctacacagcaaggagattaaagagttcattagctcctttctcctttaccatatagacattttttctattttaacttctgattccaaaaggtaaatttcctcaaatgccagatctaaaaaccctgtgagatttttcttctctacactactgtcctgttatcactgtccttacttagagtcagccatcaaagttaagcagtattggctaaatcagaatattgtacacaaatgcacaaattcagatagaaaatcagttaagttacagccaacaatatggcttaagcagataaaggtgcttgtagccaagttcaaggaccagagttcaatcctgaggactcatatggtaggagaagaccaactgccactagttacttctgattttcacacatgtgctctggcacatgcatgcctcccccccacacacatatgtgcaaaataataatttcacagtctatggtgacatacttatacaaaagaagaaatggacatgatcataatttagctgcaacttaatctaagttactacaagtaatagctaaatgtcattaggaagcaagaacactaataaactagaattaaatgaaaattaacagtatgaattttatggtgccacccaaataaaacttaataaagccaaatgccatcagtacagaacttactgtccttcggtagcactgtgatgctaatgccaggatcactaagtttgatgaaaggtggattccctgttttcctgtcttcttctctgataagcaggatatttttggcacacacattcccatgaataagggatttttcttcctattaaagttaaatgcacatacattcaaatatcaatacccaaataagtgtgcatataatatgcccaaagctacaacacagatttaaagaagacaaaggacagcatagtaaatactaatttgaaggcatactttgaaacagcaaaaggaagtctttggtttcttagtttaactgatgtaatgatttatacccacactgaaccgaatgttactttcaaaggagacattccaaatgataagcacgtctaagtggtaactggcattagaaaagactatctctagttcaataggtgtatgctaatgactggcaggctctctgttgttctgcacccctgtcgacgctgattactcactaaacacttgttcaattgcctacaaacaccacaaggtatcttctgctatcccagcagcaagacatgctcctgtaaatttttggtcaaatttcctaaacccaggtatgttatagaatattttttttaactgtgtaaagttttgttacattgtttctactgcttctgttaatgatgcaaagatgtattacatttgtttaattaaataaaaattaacctggggtcaggaggctgagtcagcaactagctgacaggaagtggtaggtaggaaccaagtgtagtaaggattttaagtggggctgagcagaaggatgcctggttttttgggagtcgaaagcaaagagagaaggttaactacttgctattcagcctctctgagcaaacagatttcacctcaacctttgaatcttgggttctatagaggggcagaggtctcgatagtttcctttagtggctgtgatagagccggtgcctgaggaaacagaattcctaccctgccagttgggacagcagctgcttaaggtgcagccactgtactgaatgcacaacagcacaggtggcataaaatatgggtgcctactgtagttctaggagattggagggacagtagcactgtccctcagagctgatttactatctacatatgtctgtgatacctttcaatgcctagcagcattttgaatgagctagcattcattccaagatttacttctggttgccaggttaaaataattatattactttcatgaaatgaaacagcaaattttagttttttaaaacaaataataattaggcatttacttactagaaaatgcatggcccatgccaactgtttagccactccaagtttccatagtatatttatagaatttttgttttttttcaggtatgtatccagggatccaaattttacaaactcttgaaccagaatatctgcattaaaatgtaggtaataataaagctggagtttgcatccaattaaaaatgtataattcaaaatttcaaaatacttgtgttatttgtggatacaatatgcaaataaattaagtaaactgtactaatttaaagtaaacttaatggatacacatcactacagttttggttttcccttacaacagtaagaggcaggactctaaacagtttatacctaacacataattgtatatataagatactatattttatacatactccagaataactgagaacctacctagtgccaatattcagtcactttgatcagtttcattaataattcagcctatcatttatatgctttgttttcataactacaaataagctttactgaaagggccagtaactccagtgttaacatgagttacctataatctgtactgttatgtgcacataaagcttgtatttctttactgtaatatgccatcattatgtatcattattgcaagacatactaactctattcggcattttagctttaaatactggtttcctttttcacaagatataactgaacaggtcacaatgctttcaagttcagcaatatttgtaattccattgctgcactggtacctactgcagttagtcctaaatagtaagaattctctgagataggcatggcattaacaaaggaaagccattggctttacttactctcctctccacagacacacacaccataattcaaaaccaagtgcttgtgagaaagctggctcatcatgcttgccgcctcaaagaaagactaagggggggaagaggaaacaagaaatgtgaaggatgtctgttcactgatgtccataggcatgcataattcagaaaaatactgacttaagagaaatactctgtcttgcccttagttggacattacaactttttagtacagtgcctttcaaacttactctttttaaatactgattgactgactgactgagacaggatttctctatgtagccctggaactcactttgtagaccaggctggcttcgaactcagagatcccttgcctctgcctcccgagtgctgggattcaaggcaatgggccaccataccagcttcaaacgtattcttaggtaggtgaaattgtggaggaatctacaaagctctgagtagtcccttttaaagggagcagcctctgtatatgtaaagatttagtaacccctataacacaatactgaaaacaattagtgcattaggaagttattttcaaattctattcgttttaggcttggatgatggccccatggttaagagcactggatgttcttccagaggacctgggcttattgccagcactcacatgcccactaacaaccatctgaaattccagtttcaagggatcctgtgccttcctctgacctccacaggcactaggtgtacagacatacatgcagacaaaacatccatgcacataaactaaaaataaataaatagttaaaaacaaataaataaaacctaaggataaatttcacagaaaaattaaaaccctagcatcttctatagtgtcatcatcatgcagccatagacgtccctttaaaaactaaaatcactatttcgatagaactcaaggagctgggaaaggaacactagagagtccagaaggaatgcaacatggggccagttgatttccatgttacctatttccccagagctttctatgtctaatcacttttgctaaacacccaatgtcatttagcaggctaacttatccctgctctgcactgatttttttcccctaactcttgcttttttctctctcaaagaactcagtctggtttggtttgtagatctctgtacctcagcctcctgggggacaggaccttctacattataattttaccactttttgccatctgccttttgccaaaacccctcacccctccttttctacttctattcccatttcaatcacctcctcctcttcttcctctcccagtaccatacactagtcgtagagcagtttgtcttttctctttctttccactcatgcccatacatatagtactaccaatgtctcattatttcctaaaatgatgttctatagtctgactgtcactctatgttcatagtgggtctattcctggatagtgactactgcagaggacaacattctacatacaaaaaaaaaaaaaaatgaggatagagcctggtgccctgagcaccagtctaaccaacgacattatttatgaacgaaattgtgaaagaataaatacattctaaaacaagtaaagtggagagcaataaagaaactcaatgctgatctctgacctctaaacacacacacacacacacacacacacacacacacacacacacccttatgtacatgcatacatatggccccccacatagcccctaaaaatagaacttccatatgacccagctatactgcttctaagagtgaatccaaaggactctatatcctactagtgataccaacacatccatacatactgttgttatattcacaatagcaaggaaatggaaatagcctagatgaccatcaactgataaacggataatgaaaatgtattacatatacacaatgaaatatttagtcataaaaatgaaattataaagtttgaaactggaaaaacagtactaagtacagtaactagtggggctcaagagaagtgtcacatgctctcttccatatgtaaatcctaccttctacttctcatgcatatgattttatacaggagtacagacaggtccaagatgctagcaaagagctcatgagatgggaagaaggtcctttaagggaaagcaagataacagaatgcatatagatacagatacaagggtagaaaggtaaagattgaaggatggaagaagagagtagagatataggggggtagtcaataaaaactaaccatgtatgaaaagccatatgtaaatcagatactctgtaagctaataaaagaaaagtaaaatgaaaaccccaagagtgtgaacagagggatcttgtatatgtagataaagctattcccagaagccatggtagttaaacaaacatcccagggtcaggtggggggctaccttcctacacatggttggtcaataaggcctgacaccctcaaaataatacaggcaattactactgctattgcttgtgcaccaaaccagactctaagagcctattgctgaagatgtcacactcctgagtcacaggacatagataagtcatgatggaactgggctggctccttgggcaaaattgtcatcaacggtcttcttcaactatggatcctgtatcaacaataccaatcagccagacaataatgcctaatagtgctgcaactttgacaagtctttttggggggtaaccaactgctttctaattagagttgatacttgcttcactggagaaattcacgccttgtactgtaaacctggccacaggttgtgactggggaggtcagaggccctagtggtgaagctactaatgttttgctaaatgaacatgatattcccagcaaagtgcccctgaaaatgtgtttctacccatagacagattagtgttgctagatgctttggactaagcagcttctttctgcagtggtcagcagtgaccacagcaactagcaattggtcaaaatactgagaataagtgactctcaagttctcagtcataaacacggcagcagtatcacacctctgtgattgtttggataagaaatgtcccctgtctggttctgtgtctgaacacgtggtctcttgttgggtgcacagtttgggaaggttatgggacctttaggtggtcttcgaaggtttataggtttgcccacacttcctgttcccatcccaccccacctgtaccaagatggaaaaaaaaaaaaacggtatcagccaggctccttctctcgtcaccatgccatgtcttctctgccatgatggactcttaccttttgggaattgcaagtaaaaataaacttttataagttgcttttgatcatggtgtttatcacagcaatggaaaagttactagtataccctacaaggctcaaggaccattgtaggagaaagagtgtaaaagcaggaggaagggtggtatgtatggaacagacccctggacttgacacacaagctgcactcttcatctcaaagcagcggtgctcacctgaccagatattcacaagatgagtcaggaaggaagagctcgaaacccaccagtccctaaggattttatggttggtatgagaggggttccttaatggtggagccactgggaaggtgactatattctgtaaacaaactctcacccatactcctgtaagaagccctgatgaaactcagcagatcccatacacacactcaaagacatacaagtagaacaggtgctaccacagggagagaaagagaatcattgggaggaggacatgagaggtaacagggactgaatatctgaaatacattctgtaagtgtataaacatcccatactgaagcctattactatacatagttaatacatgcaatagataaaacataaaatgttataatttgaagtctcatacatgcatttagtatgcttatgaatacacttcttcatatagtataagaagatacatgaagggcccaacaaacatacacacctccgaataatttctatgtgctttatccagaactttcaaaagaacttctgtttcatgcagttggccatagtctccaacttctcttcttaaacctttaaaaatttttgtaaaagtaccttggccaagactttcattctttaaaagaagaaaaggtaagggggacgtgaataaagacagatgaagtaaagaaattagaaaatacattcaattaaccaagttttaaaaatggtaaacatttcttttataaactgaaattaattcactattcttcttccttaaatagtaattaaaaatagaaaacaaggattaataaatagagtatactttgactctatcttattttcacatctcctgtaaaggctacaaacttttctacaaacaatccttttccttcagctttcctcctagtacagtacaaagggagaacagcggggtaggtgggctttctcaccacctcccagctgtttggccttttagaggctttcaaatccctttgtgcttctgctgtcttggctgttctccccaaccccctcccactcatctttttcttgtcactatgtagcccaggctagccttgaactcagtatgactggactcttcatctaatgagtaataatacattttcctgtaaaattgctttgattaacaggtgaataaatacttgaaagcaccatagcatgaaatagactagatatacatgaagttatagctactaccgctacccccagtcctaatatttattatttatctttccagaaaaactgctgaaaacctgcactctgaagcaaggctgcctgtggtcaaatagaagctctaatacttagagcactttacaatagtgaagttcccagctcccctctactttctgtcctgaatgaaaactaatgccttcacattctggaattcctctccctctcccctcctcctctctctgtccctctccttctgccctcctactcccatctggtctctcactgtttctgaggcttaggctgacctggaattcactattgcacacaagttggcctcaaacttacaatcttcctactcagtctcctgagtacaggaataacaggcataagccaagatacttaattttaaaagtctgaggtctgttgttaaatttgaggtactttgattaaagtcaggactttgtgcatactagacaaatactctaccactgaccacaccaggtctgccttctaattcactcactctcatttcagtagtgggtagtagctttctgaactgtttgttaattaagtggcaagtgcaagagtagatctttagtatctatgtcttttccccctgaaattttgtcttttaagtaataccttttaaatgttttcaatttactgttttcaactcctttttaaagatacctacattttatggtctctacttgaaaattacataaagttattagaagtgtaagtttgatgcctgtttggtttgatacttaatcctggataatttccctgtatgtttcaattttttttaataaaaagctcactcttggagttggttttatctatggaaacccaggaagcctgagttaagagaacattttctttatttcctcttcagttgtttgttttaaaaacaaggtctcatatagtctagtatagctttcaactctacatgcagctaacgacagcctggaactcctgatatgcctgtctctcttcccctaagtgctgggattttatttctggctcagagtgtgtttttcaaaaagtccatgtgtgtttctcccaaggacctttggtacagtctttaacttactggcctactgtctctcagatcatgcagttaccaaatataatataggtaatataatgaagccaaactcaaaaacttatgaactcctcttttttctcaggaaaaaacgactattaatttttctcctttggctaggaggtaaaaatttcacattctatataatgaatgcatattcttcaagtcccaggtctattcagagataagtctcacttttaattcctgcccttgaacaaacctatgaacagccctctttctttataatgctttccattttaactgctacaataaaaggactaaactctagccctctcatacaccacataacagtcgaatcacctcctacacacttgtttgttttcagttcctactgaatttcccttacttgcttgcatacaaggaagccaagacagatgtcttttgtagaaagatctttaacttttaaaatttacaatttaaattttttaaattgctgaaaagagactataactccattattgactatgctaatgggttaatattaagagagagctagccaataagaagcctggccatcagctaacagtttataattaatctaagcctctgtatgtttatttgggactaaatggctgcgggactagacagaacagaaacatccatctacaatgtaagtttataataaaacatgtcaaatattacatgaatataacagcatgtaagaaataagaaaggaattgttttaaaaggacaacacataactatgaagatctaatggcttacaaatatcaaatcttcatttctgattttgtgaaacaccatttggttcacattattatgcctctgtaatgttggtgacatttgaacatcagaaataccatttgttctgaagacaagaagatttgatttatctggaaaaaaataaaacaaaacacaagatgtttcatgtgtgtgtgtgaatgagaatctgaatataatcaaaacatacccaaaataagaactgctccaaagacaagtgacatgagtacgccctgagtctaagaaactctgaatagctgcttagttactttaggaattttattattcagctctgactgatacaagaaacacattgaaatgtacaatcacttcttggcagaatttttttctgggaattttaaaggagttacttaaagagatttccaatcttattattttattttaaaaacgagaaactaaaatcctaaaaacatatgaaagtattaacttaaaacacacagggatttggtagtgagactgtccagttctgcaagtgggtggctgacagtacaagcaggtatcttaagagtggatgtgctggttacaccccaggctatatgtaccaaagcacaccagaaaaatcaacttgctttcatacaacactgccttttgatacttcgtttcaaattaccacccaccacacgcagtacagggctagcctctctaaaacaactgggtttacattaccttttggctttgggggacagcatttagtaaactggaagatgatgctgtctgagcgcacagtttccatctggtagcaattcaaaaggtccttaagattactgaagttcctctttgtcccactgaggttgtactctctattctcattcttcataatcagacagtgtttatattcaacaacattttctcgctatgtaagtatagttttaaaaaaggaaggaaaatcacaatgttaatcatgcagattatttggccaaaggggatatcataaaaacaacaacagagtatttagacacttaaactgtcaatcttaaagtagtgcctcatgaaggcatctaatcacagtgccatgtcctgcagaagatgatgtaacgggatctcattagagacatcctgaataacaccaccaccatctgcacagcttccccttgtctaacactggtgtagcacatacccttcatcagctcctgcatcctcctcctccatctgcccatggtcacacaatctgctttgattattagtgcttttttgctggtcctccctaaaggactagctcctttccatagcaaagattcatattccattgcatactattctattttttatattatctctaattagcattttgtagttttctgtcttaaaaatatctgtcttatgtaataccctatgaactacttcactcatcttaacaatttgacctgctttttattactgtattcctcatactttgagccatttacgaaacaactgttcatccttcaaggcaatctcatgtgttttggattctaaaaaactctttctgaataaataagatcttttctgatattgtctatgctaatcacaatgcttaattgaatatttttagtatactttaaattttttgttatccaagaggaagtttttgaaataaaggtttgtatcatatgttctctaattccttatcactcataataggtacacatgataaaaatttgtgcattttgaattaaccacagacagtcatatgttttaagaagatactaggaagcgaggactgccagtttgtatgatggtgaagcgacgcgatacactttccacgtttgtagacaattcctgcactacatgttctgaataccagacagcggctttataaaaataattgaataataacatctttactttctctatttccttttttgtttgtttttgtagccttggttgtcctggaactcactctgtagacaaggctggcctcaaactcacagagatccacctccttctgcctcctgagtgctgggattaaagacgtgtgccaccaccacccagctactttctgtattttcaaaaagtaaaataaatctggatgttgctacaaaactctcaagatttagaccacataattgcctaatttctaaagacacctgttgatagtaaacagatttcagtgagatccaagttcatatgcacttaacatcaaggagggttcattgtactcttacatttaaaacacatattataacactagctggaagtactaccatgtttctgttgatgtgctttgctccagctagtaaccattgctaggaatcagaaaaatctcactgattttcttctacatactttggtaaatagtttttttttttttgtagttgagttgaatatacttaatgaaataccacttgatacacgactaacactcaaatatcaaaaaataaaatgtcaaataaaaaaacacattgttatttacatatttgcatgaactctatggattgttcattttatagcatatgaagatatactaagcattattgtgccagttaccatatcaggaactataattctgagtttttaaaattaactgcttcatgatagagaaataccaattacacagcatgttactattaataagtatgacacactaacctccacagcaaaggtcagaaagtatttgttaaagtccttagggctacatcggagtacatacagtcccatctggttacctgctttctttagtttactaatggcaaaatccattctaaaagttaaaaagaaacaatgtgaatggcagcatgcaccatgtaacgatgacaaaaggccacaaccatcaaataaaaaatgattttcagaagattcccctattatgtatattataagttattataagttattttttcaagggagagaaaccaaagtttttttgtaatgaattcacaccaattcaagggaaaactatattaagacattacaaaacaataaaaccaaagaaaatttgttcattttaatgttctgctttctgattacaaattgagtaattaaaaaaacatattccataaaacttcactaagagtaaggacagtacatgataaagtgtttgtcatgcctcttctatcacaaaagtaataatataaaaattacctttctatttaaaacagtatcaaatctaacctgtggtgactgaaaaatgctagtcttaaaatttgttatgtgggagctgggcatgctggtgcacacctttaatcccagtacttgggagacaaaggcaggtggatctctgtgagttcaaggccagtctgttctaaaaagtgagttacagaatagtcagggctattagacagaaaaaccctgtcttgaaaaaaaaatgccatttgcaaaaacaaaacaacaaaaaaccttgctatgtgcataaaatttgaagctgcagcatttgaaaggaggatataatttacataaaattaggaaagtctgcaaaggtgtgggccatatggtagttgtcctgctgagtttttattatcaaggtgaaagaaccaagagtcacctgggaataaggagtctcaaggggaagactgcgcagattggactggcctgtgccatgtctgtggttgttaacggtgtgggagggcactgtctactctctgccatgctcctcttaggcaagtcgtcctggtttgtatgagaaagcaggctgcccacaagcaaggagagcaagccaggacccagggtttcatcatggtttctgctttagttcttgttagagctcctgccctgacttccctccacgatggggtgtttttacactttgtaaagatgcgttgctgtgattggaacaataaaaagctgaaaggccaatagctaggtaagggtataggtaggacttcccaagcagagagagagaactcttggaggaagaaagctgagttgccagccagactcgaaggaagcagaaaagcagggcatgcagtataaaagagagattaaaatgtgggttaattagaagagctacttggggaaaaagcctaagctaaggctgagctttcataattagtactaagtctctgtgtcattatttatgagctggtggcctaaagaaaaatccatctacagattgtgacctggaagtatatgccaattaattcttttctccccaagttgtttctgctcagcaacagaaagcaaactagaaaagaaattcttagccatgtaaaggtatataaaggtaaagaaattaaaacataagtcaatagaaaattcaaactatgtttaattagaatgtccaaacacggacccttttcagcattgtggagttccacacacagcactacccttgaaatatggtatagtacacattttgtgtttaagctttggaagaggttgggccactcaaaaataatgttaattttcaagttcaacactgtggttatttcacagtatttcaaagtttgtataacatacatgggagaatatttttatttgtttgctttcagtgctagagagtaacagtgccctaggaagacaccattttttaaatgctgttctggatgaacatctaaatcacaccatgaatgtggaatcttcacttcaggagaactgattgtgtgactgtacatttacttcagaaaaatgcatctctctggagaccaggacatgccaagtgttccttaataatacacacacacacacacacacacacacacacacacacacacacacacacacacacacctttatattctctgtcttactgccatgagaaaaggtctctcactgaaccaggagttttcggctggctggctcaccccaaagttctcaggctgtgcctgtctcagttcataggcacatacaactatgtccagtgttttacatgatgttagaatcagaagcacatacagctgtgtccagtttttaccatgaatgcctggaattcaaactcagctctggatgcttgcaaaggacccaccaagccagtccctgaaaatgtcttttaagagagattactcacgagatggggccgtggcagttgctgtgcatgttctccagcacagagggaggggctacttccttacagaggtaatgatgtgcgtctgcagtgagtctgtaatagccatccactaaggacacaaatgacaaagcttctcttaaggagctaagttctatttcctaatcagaaaagaaaccacataattaaaaataaattaagttttaattgttcaaatctctaataacttctaattacccagcctgacctaacaaactcttaagtctgatccttaagaccttcccatgggcttaacacacctttccagttacagtcactcaacattcacaatttaaatacactcttcaatgaccctgctacactcaaacgtctaatctatataaaggttaagattaattataaatatgaacatttattttatatacttctcaggctaacatgcatgtactagaaactaaaatcttaggatatggaactatgatgtgatttttattaaaagacatatttatgaatatacaattagccaaaaatgtgacactttatcaaatggaaaagcatattcacctatcaaaaagtatttttccatatatcaaaataatcagtgtaactgaataattgaaaaataaagctcaacttacagcagtaagaaaaatgtagtatgttgaattaaacaactaaaaacctggaaatgatcatcagaagtttcaaaatactctcgtacaatgcaatatattttctaaatacacagaaaatgaactatgttcttgggtaaggaaattcaaaattatgaaaatataaacacatatcctaagctgggcacagtggctcacacctttaatccaagcacttgggaagcagaggcagatgggtctctgtgagctccagtacagccaaaactacatagtgagaccatatctcagaaaaaataaaaacaaaacaaaaacaacaaaaatcctaaactaatttgtaaattgccacaatctcaaggagaacaccagcaggcactacagtcgatatttatgagaaacaagacagacatgggcttcagaacagcaacagattcacataggacaataatgactccaagggtaatgggaaaagaatgcttcctcctgcccccccccccaccctatcccacaaactgctgaagtccaagagggaactaagtgcaacccagaactggcgtaagagattatgtaatggggtctctcaattatagtatctctaagtatttgtagtaagaccgacaatattcatacaaaaatctgcacacaataagacatttgctgagctggtatttttgtatcatacttgtaactataaccagaatacctaagcaacactaaaatacttctgaaaaattctaaaatgtcaccactttttacgcatgatacaaacttaccaaaattttaccatcttgcttatggatagttacaagtctactttcatttgagcattcctggtttgcttgcttaatgctgacatcaataatatcaggaaaatcacaatataactgtaaaccctgtaaccaagagcatttaaacagttataatgcctttcaaacaagggttagaaggtggaaacagtcacttaaaattctttaaagaggtactgatagcaatatataggctttaaatgtgattacatctcctaaaaattgagccctaagacaatgtttatatatttttgctttgacttaaaaatgaaatcattaaagtatgacaggaaacttttgtattatagaacttaacccacttaatattataatgaatgattgtcagaaaattggagaattatcaactgtggtaaaaaaaatataataatattaaatctgtcaatatttgacttatacacattaacaaatttaaatgttacaatgcaaatataataaaactaaatatattatcaaaatcagttaaaagtttttcatttaagtagctttatgatagtgtttaaatgtcaataataatgaaagaataaaggaaataaagttaatttaaaatcacaaagacaattcaatccttttcagaaattgtaattaaatcattactaattattttgtcacaaaaattagcaaaacatttaagagctatagttacaactttgatggtgttacacaaataaaatttctatcagcagagaaaatcaagagtacattcaacaactaaacttagtttgctttcatggtcattgtacttaacataaaagagcaagaacgtatcattaaagattacctgttctgtcagtgtctcactttccttatgtctccctcttgaccactgaattccaccgtttccagttattataatggttgcaaaaatctcctcacctgaaggacctcttgcagattcttttacttcaaattgctctgtgtagaaggcagactgcagggtttccaagtttataagatacttaagtttcaagtttctggcagtggctttgcattgactgaactgctgaatgaatctgcgaaatctataccttattcgcttccgggttaaaatatgatagtcttggatctttgctcgaacgcactttggtaagaatgtcttgtagctaaaaataacaagcacacagaaaacaaagcaaaacaaaattaggaggttaattctcacctttccccacaagaagcattttctacagtcaagtgagtagttgatgtaaccaccatctggtatatatgcaaaaccattccatttgatgcacaaacattctgggtgacaacagaatttagaataggacatactaattttaaagttgtcctttcaagtatttcttcagttattctgaacttattagtgttttcaaaacaaataaagcaagtaatgaacacctgtgatattttatacaacttaatttcttcttatagagtatgtgctatactgaaaaactgtatatctccacaaccttttatttaatttctgagtatttgtggtatatgcagaagagcacacctatgtgtgctgatgtacttgctgtgtacatcctcaagtagagatcagaagtcaagatgggtgcctttatcacttccccccaatttattttttattaaaaaaatatattattctatgtgcactggcgttttgcttgcatgtatatcatacccatgcaatgcctgcaaaggccagaagagagcatcagatactcttggaatagttacaattggttctgggccattatgtgggtgctggtaatgaaaccaggaaaagcagccagagctcataactgctaagccatctctccttaccctaatgttataactgggtatgtgaatgatgtatgtgggagcccactgtcagagcacgtgtctggaggtaagaagacagctttgtggaatcagttctcccctcccatctttatgtgtgttttaggaatcaaactcggatcaccaggctggtgtggcaagcacctttacctaataagccatctctctagctcacctaccatattttacaagacagggtctcctactgaacctagacctgtcgcactatactgactgcaacacccaaagctctttcttcacctacccaacacggcagttacagtaatacattatcatatcagcttttatgtgtgttctgaagataggaactcaggcctttgtggctgtgcagtgagtacttctacccactgagccatttcccactctcactatttttattataacatcaaaatttatagcaaacaccgaacatgtaaattacataaaatatctaagtctttacatttgttatgtatggatatacaaaagggaattacctgacagagttatagacagctagtggagtttggtccttctctttagctattctcatcatatctagtactgccattccaagacactcttcttgagtttcatgagtcacgggcacttttatccatccgtgcacaaaatcatgccgccactgaaaaaagaaatgataagggaatgcctcaagtttcactatcacatttaattacattatatcatataaattaacttctaaaatatgtgttcaagtcataaatcaactcctacttttatttgtaaatcatttcaccaagaaacattagtaaaggttcatatataaacagaaactgacaagttgggttcacagcctatctcactatttatattttaaagttttatcttaacacaaaaatagctgaaccaaattttttaaatttatttattttttatattgcaatcccagttccccctccctccacttctcccactccctctacttccccccatcccgaatctgttcctctgagacgataaggcctccctcccctagggagcctactaagtctgtcccatcatctcttgaggcaggaccaaggcacctctccacccccacactcctgtgttaggctgagcaaggtattcctccatacagaatgtcctccactaagtcatttgtgcattagagttagatcttggacccactgccagtggcctcatatattgtcccagttacaccattgtcatctatattaagggagtctagtttggttttacacaggttccccatttgtcagactggattcagtgatctctcactagctcgggttagctgattctgggggttttcccatcatggtcttgactcctttgttcatattattgcttctccctcactttgattgtactccaggagcttggcccattggttagttgtggatttctgcatctgcttccacctgtttctggaagagggttctagcttctctggggttgtggattgtaggctgggtaccttttgctttatgtccggtatccacatatgagtgagtacatatttgtctttctggttttgggttacctcactcaggatgggtttttttctagttctgtccatttttctgagaattttaggatgtcattgtttctgaccactgagtaatactccattgtgtaaatatacaacattttctttatccattcttcagttgaggggcatctacgttgtttccaagatttggctattacgaataatgttgctatgaacatagttgagcaaatgtctttgtggtgtgaatgtgcctcctttgggtacaagcccaatggtggtattgcagggtcttgaggtaggttgatccctaattttctgagaaatcgccatactgatttccacaacagctgtacaagtttgcacacccaccagcaatggaggagtgttcccctttctccacaacgtctccagcataaactgtcattgttgtttttgatcttagccattcggatcagtgtaaaatagactgtcagagtggttttgatttgcatttccctgatgactaaggatgttgggcatttccttaagtgcctttccaccatttgagattgctgaactaaaatttaattaatcaaatataccctgatttcaatctgtactgaagacattatactagagtttgtgtgggggatataaagatacatagaatatggtccaaggaatcaaaaagaccaaaacttttcttggaagctaaacagaaaagcaggtcattacaatgtcaggtaatataataagaagtacaacataacagacactataggaaccttagagacagttaaaattatacacagttggcaaaccagaacaaagacatggaaagaatgagacaaaaagaaagtacagggcacactcagagatttaaactagtagcttgcctgggtccaggctgaaaatattcttgaatgacctgacactagaggcagtgaaagttttttgttttggtttgcttcatttgtcttgccatgtctctttccctgctgggacagtaaaaaacagtagatgtgcttggacaaaataaagtgtactaagaatacatggcttagatagatgataataagagtctgctacaagaaatagatgacattgcaaatcaacaggtaagacataaagaagtgagaaaagggggtgtgggggtggaaaatatctgttgtgcaaacatgaggactagagttcagctccttagcagcctttgaaaagtcaggccagtcgcaggggcacctgccttcatgttagcattgaagagaagttgacaggatactctgtggagctaacagagcattcattctggccaagtagtgagttacaggtacaaagaaagacccacctctaagtgtaaggtgaaaatgattgaggaggatgccagatgctaacccctatctctactatgtacatacactcacacacatacatgtgaatttacacacacacacacacacacacacacacacacacacacacacacacacacacacacacgggggagagagagaagggaagacagacataaaggcagagacagagaggcagataaagaatgaatatcaatatgcccaagtgctgaggtatgcatgaggagagcagaggaaaactttcaggattggtcctctccttccacaacgagagttctgaggatcaatcttggcaccaactgcctttacacagagccatctcaccaaccctatttttgttcagttttaaacacatttcctcatacttaaaaatggcaagttattccctttagctaagatctatagggaactattagctctgtaatagcatgtgtgtgttctgttaccatataaaaccagtaggtaattaagttcttctcatcaggaaattctatagaaattataaccaaaagaaaataaatgtatgaaaaactagtgtgaatactactaaagaataaaccaacaaataggcattggagaaaagttacatatcagtctcaaatgtcaaaacaaagtcattaagccagaattatttaaaatcacattatgtgactaagaaaacttcatttcatcaaattcatttaactaaaagttcccccaaacttttaatagctgcatttaacccaaggaactttgtatctgcactggccagacaaacagaaaggagtaagcacagtgggatgccaaccttgaagatactgtgctaagtaaaataagccagacgcacacaaaaagcaaatactgtataattgcatctgtatacacaaagtactaagataaacacacattctgcctcacaggagggagaatggcaaactgttaagattggggagaagtggagagttactgtgtaagggtatgaagatgaacactgttctagagaatgatgttagttagggttgtgaggtgctgaatatgcttaatgaactgagctataaatttgaaaatggtatgcttttaaaattgtattatgtacattttaccataatgaaaaaacctgacaatcccacatcctcaaagagaataattttttctgttttttgtttatagactcaacaggtttcacaatattggaaatgggagccagggagctgtgtgctcttccctttgttgctatcaatctcattggaaatccttcacctcacacactgggaacagacaccaagggaactcaccatttctctgctttctttaacttctgttcatgctattctagcagcccatgagaatataataatttaataagaaaatatttcaactgctgcttaattcaaggtaatggagaagaaggcattatgaaatgttaagtgtacagtaagatggacaaatagctgtgctcagctctctaagaaccagtatgtagacaccctcccaactagaagaggctaccaactatcacagctcacttttccttttcttttctctttctttctttctttctttctttctttctttctttctttctttctttctttcttttttgagacagggtttcttcatgtaacagtcctatatgttctggagctcatgttgtagaccaagttggccttggactcacagagatctgcctgcctctgcctcctgagtgctaggattaaaggtgtgtgccactactgcccagcatcatttttgttatttcctcctgttacgttttactgcctatcatttaaacctgaaattatccaaaatttattttttaaaaactctaaagaaattttaccatctaatggccacatgaattgtgttataaatttattctacattttttcaaaatcctaaaagaaaaagaaagtgatttcaaaagagtcaacttattaaaaaaatgtaaatcatgagaccaaaaattattattaaatagactatccttttatctttctatatacctggagcacaagttaaatttagtcttcccacttgacattacttacccactaaaggtatacattacataagaagatatatctagcttaatacacatataaaaattaataattatacctgagcaaaaaggtaagacatgacaaagtcatcaagaagaggagcttcagccccacgagatactccatatcgataggttctgttgctgccactgcaataccagtgcggaaagtaaaatctataagagaattcaaacattctgttagcttccagagctcaagcactaaccacaggcatttaaccaccctcaacattctaaaagttactaatgtattgctagaaaacacaaatagcagcgttgcatacaagttgtgaacagaaggatttgtgaataataccacgatagcaatgtaagcagaaaataaaagaaacacagtaaagcacagtggagcacacccaggaagctgaggcaagagaaccatgagtttgagactatcctaggctatctagaataccgtttccataaacaaaacaccaaactacaggagcagcagcaaatgaaacataagtaactgtaaaatcaacatacttcccactttggtgcaatatatagtaagatcatagaagaagaagcaatcaaaggagacaggagaaatatagacataaaagtcagcagaagcttaagtccagtagtattaatagacacatctgaaaatacagttttcagtgtaaacaatttgtccttcatctacgaaaatgaagattaaaatttgtctttcaaagaaaaattaagtatgtttacttttgaaagtaaaagctttgaaggtgctggagagatggctcaatggttaagaacactgactctgctcttccagaggacctgagttcaaatcccaacacccatatgacagctcacaactgtctataactccaagatttgacagtctcacacagacatacatgcaggcaaatcaccaatgcacataaaataaaaaatatataaataaaatatatttaaaaactaaaaattttgagatttaattaatctacacaaagcttgttcatttaaagtgcttagtgatttgtagtattcactacaaatggtaccaacatcaccacaatttaatttgcttttttattatttccccatacccattagtaatcatacctgagtaagtcaccctgttaatccctagctataagatacctttttttataaattctattctacttattttacattaaaaatactggctatgataggccatctttttatctgacttcatttacctagcataatgattttaagtttcatccactttttgcatataggaaatgtattcctttcttctaatgaattaatgctgaattgtatgatgtaccacattttatttatccattcatcacttggaaagcatttgagctacttctattttatgctaatgtgacaagcactctgtgagtagtgttttgtggatgcatgttagtaactctctaatatctttcagggaaatggccaatctttttccaaagtgacagtgtatgagcattctaatcagtacaaataattttcaacacttaatattgcctcccctttctgatgttgctatctttaacgctttaaaattattttgtaaaagcttcattactttgttacaacttacatacaacttgtatgtaagaatgccactgctttttaccctttttaacaatttattaatatttactttgtgtatgggccagaagagggccatactttgtgtatgggcctgaactggagctacacacaattgtaaactgccctgaaagtgctaggaatggaatctaggtcctctaggaagagtagccagtactttaacccagaaccatttctccagcccatatgcttttcatatgtccattatttagacaccaaacactttttactaacgtcttacccataattttacatgaaaatgatgctcatgctcaataaaagttataccttaaaaacagaaaacacaagctcatgcgtctacatattttatacagattaaggagaagaaaataagaaatgaaatatgaacatttattaagaacccatcaagtactaatgatgttgcaacactgcctagcatgcatggcaccctgggtttgatttccagcaaaaccaaactgggtggggtgatacattcctgtgatcccagaactactgggagaggcatgaggatcagaagctcaaggtcatccttggttacaccttgagttcagggaaagtctaggatacacaagttcttgtttcaacaaataaaaataaataaataaaaacatcaaataatgaacctgaataccacacatattatctctttaatgaggtacatgcaaggtggctagaaggcagtttgtgaagcaaactaggtaggagttttttccaagctgtaagactgaggatgagcagtaagtcacagcatcagatcctttattttacaggaaactcttagtatttcataagtcataagaaaattaaataacacatatgtgcctggagaattgtagctgtttgtaagaccaaagttatttctttgctaccccttttatacagaaaaatcttctggattttatttcagaaccttaagcgatattgcacatttccataaatcactaaatgaattatcttacaaacaaaaactttaaactttaaaaactatttgtagagctggagagatgactgagaggtgaagagtgctggcaactcttccagaggttctgagttcaattcccagcaaccacatggtggctcacagccatctatcatgaaatctgttgccctcttctggcctgcagaaatatatgtagacagaacattgtacacataataaataaataaatctttttaaaaaaaaaaactatttgtaaagaagagatgtaagcttgtattttattgcacacacattatatttcctgggaaattggcaatattccaaacattaaggattttacacaagccatttttatctgttttttatacttaattataatcaagccataagatggcatctcaacagaagaaaacatcataattatgacattatgcagacaaaattttatcccactttgacttttattaacacacaaataacttaacataagaaagtaccttattctgtagagtacattatgcctggttgactcatctatgtggaagacatggttgggtgggtaccagatcctttctgtttcactcattaaagcaaacatattatgatacacaggcgtaatacctagaaataaagcataaagaggacttaagtagatagctagcagagcatttacataatgggcataatctgtcatgacgtgatacctaaaattgaagcaaaaagaactgactacagatagctaacagagcatttatgtaacacataatctatcacgaagctttggtgacagctcttccagtcagcagaaacttcagtagcaggtgaactattgtgggaaaaaaacatcttaaaaccaaatgttttcatcaaatacctctttatattttaaaatatgaccgttcttattcctgcatggagataaaaataatccagcttttaactgttttctaaagagtttctaagttcctcttaacccctgggaaaatatgtcgtgtgagaatgcacatgtgtgcatgtgtatatttcaattgagagtgattatcaaatcactgagataataacaagtcactggatacttttaaagaaatgacacattttcatattaaaatgaaaagattttatacaatatgacaacaattatattgttgcactatttaagtttattttaaaaattaaaagccaactgagccatctccctgggtcccataaagttaaatgacaactgggccgtctcaccggacccaaatacgtttcctttctgtcttttttccttttggcaacagagtttcatgtagtccaagttgacctcaagttccttatgcagctgaagctgaccttaggctcctgatatgccatcccccactgatgggattacaggagtgtgccaccactttaacatctcttttccaatatgttacaaagtacggatgtagctcaatggtgaaaagcatttctagaatgagtgagggcttagtgtcaatttcaattaccagaaaagtaaagaaacactaggggacaaatatgctaaaaataaatacaaaaaaggttgaaggacagctggggagatagttcatcagttaatagtgtatactgtaaatgggtggaggtggcggtggcacacacctttagttccagcactcaggaagcaaagctctcttagttcaaggccagcctggtctacagagtgagttccaggacagccagggctacacagagaaactctgtcttgaaaacccaataataatgataatgattaataataataacaataataatagtaagtgcatactgtggcttgcaaaggaccaaagacagttgctagctttcacactgggcagctcaaaaccaccttaactctagctccagcaagatctgatgcctctgactccctcaagcacctgcatatacacacacacacacacacacacacacacacacacacacacacacacacgagttttaaaagtgaaagttaataaagcagattaaataagaataacaaatgttgactttctttagtgattaataaaattaacaagcgattttcaatctgacaaggaatttaaaaaggcacaatcaatttttaaaagtatattcaaagctttttggaagaaaagtaatagaagaacattagaccaataaatctgaaaggatgggcaattctcagaaaaatacaacttttaaaaagaaataaatattaaataaacaaaaaaattaaatattaaagacagaatctacctacattttctttttctaatttatttttattgtatgtgcactggtgttttcctgcatgaatgtatgcaggtggcagaacctctggaactggagctacagacagctgtgagctgccatgtgggtgatgggagttgaacccaggtcctctgtaagaacagccagtgctcttcacagctgagccatctttcacccccacctacattttccaatggaaaataaaggtggaagagaataaaaggaaaattagattaggaaagagagaaaacgaatcaggttcaaaagttacatatgagtgtaacgaaaaccagaagcaatgccatctactattacagataaatggcatattctacatttagaaaattgtgataccacagcaggcaggcatactaaaaaaatgatagttttgcttatcaaagtaaatacaagagtcctaagcagtactgtcgataggcaagtcagcaagggagcttatggagttcagttcacggatgactaaaccctggagaggctaagccctggggggacttctcctgaacgcccctcgattctgctgtgcttcctcctgggtgcttctgtcatgttcctgctgtatttggcatggtgtgattactatgtgaaaggatcccactgtatctaatatagtgtgattgtttcttgagaaaatcccactcctcactgggcaatttacttgcagatcataatgacgttgattttttaatttaaactagaaacaatcttattttacatatcaaccccagttccctctccctcccatcctctcatgcctcccactgaccctcatcccatccctcttctgctctatgaaaagggtgaggtcttccatggggtaatcatcatactctgtcacatcatttggggcagggcctaggccctcccccatgtgctaggctgagagagtatccctccatggggaataggctcccagtgtccactcatacatttttatatgagcaatgatcttagttgaaagtcagtgatttgattgaacttcctgggtcagcctaaaagatacaggtggttaagacagtaaaaatgattagggaaatggtgtaagttatcctgtcaattgctccaataaaagatacaaaaaaaaaaacaaaaatgggttaaaaattaccttcccctttgttagatttcagaggatgaaaaataagaacaaggaagtttcatgattacagactcgtgaattctacctatggaaaaacaggctgatgaccaaagaaagcaattatgttcctacacccaagattaggcctgagttccttggttatgtagcttgcaagaattaaccacaggttttggtatgcatcttggaaaaaaacaaaattgtgaaagaaaattaagtgactctattgtgtataaagaaaaaaaagatggttagctggccacttgtttataaagttctgtagagtagaaatagaataggaatctgctacctgccagtacaaatatatttggcttgcttaaaactttgttaatcaattataaaagaatcattgctttcgggtaaagatgttatggtgggaaacttaatacaaagaaaaatgtttaactatttgttggcttctaaggaaaagatcttaatatgatttcttcttatgtaaagattttaacttgtttttggaaaatatgtaacttgtggttgtgaggtaatcttttcttgcatagaaatctttgtcttaggtggtataaaagagataaaggaaaaataaagaggcagaacaagcagcagaaagagaacaacgacatgaataagctttgagtgctcagacaaattctcctgtgtgtatacagctctgctggtgccacgtctcttctacacagtttccctgacctgctgagagctggttctctcagtgagatcctaataaacctaacccataaatatttctttaaagaaaatcacaacacagccattgttcatttatcaaaggattgcagaaaaaagctaaattagaaaaatttattagctaggcaatggtggcacacgcctttaatcccagcactcaggaggcagaggcaggtggatctctgtgagttccaagacagccagggctacacagagaaaccctatctcaagaaacaaaaaaaagaaagaaagaaaattctattaatgtaatatatcaaaataacattatagaaatctaaagtaaaatggcaaaataataaattttaaaaattgagtacactggcttatactttattcttatctacaaaatattagttgaagtattttataataaaaaacaagattaaaattaatggtatgacacaggggtgggtctaggccctatcccaaagtaaatgatagcctcttatgaccccctatggaaggcctcaccctccctggggagcagaaaggatatgtgataggtagggtgttaattggggggggggttaggaggaggaggaggggaggcagtgggaactgggattgacatgtaaaacaatcttgtttctaattcaaattaaaaaatgaaaaaaaattaatggtatgacctctttgctcatcactcctccctctctgcaactgggttccagagttcagttcagtgtttagctgtggatgtctgcctctgcttccttcagccactgaatgaaggctctaggatggaatataaagtcaagaccaggctgctaaaacccacagaaacagctgacctgaacaagggggagcgcatggaccccagactgctgtctgggaggccagcatgggactgatccagaccccggaatgtggacgtcgaggcctcagcactctatggggcttctggtagtagatcagtatttatccctggcataagaaatggctttgggaacccattccacatgtaaggatgctctctcagcctgggcacatggtgtgtgtgggggggcctaggccctgcccaggatgatatgacagactctggggatccctccctggggagtagggggggatgggatgggaggttggttggttgggggtaggagaggagggaagggagagggagcagggattgacatgtgaatcaagcttgtttctaatttgaactaataaaagaataatttcttggaaaaataaataaataaaattaatgttatgaaaataaaacattattcctagtaaagcaaatccgcatgactaacaagcatgcaattcctatactgaaggaaatgcaaacaaatgctacatgacagcactttacacccattcattcagcaaaaacaacaagatttctaccagtgagtagtactgtgaactgtagttgttaggattttactagaaatgcaaactggtgtagcttttgagaaagcagtcctaatttgaggaacttgtgcctacaaaacatttaaacactgcaacctagaacttcctcctgtgtacatctaaaggagtagtaacaaagtaagagagaaatttcaggcagaagaaaacctagggcagtatgacccatgctttgcactgttatgaagttcgacaaaacagtgggaataaaagtcactggcttaagtagatttttctcaattttttttttttttttttttttttacagaaaagcaaggtgcactttagaatatcaatttcctaaaattacctcaaattcctaaagttggagggagggtaatattgcagaatatatgagtcatatataatgacggaaagcctttgaacacacacaagagattatttcctacttatcaggatatgactaaaggattcactaaggccctgcatgctgccgcatatcttcacatcctagcaacaggatgttgctaggcagaggcaggcagctctctgtaagcaaggccatcctggtctacataccaagttccagtcagggtgacatggtaagaccctagctttaaaacaaaaacaaaagggattcattaaatagaaaaaccctgtgtaaaaatggagagttggggttgggaattagaaaaagtccacagccaagcggaggggaaaggctcactctgcaaatgaacttcaggctacagtaaataatacactgtataaaccaccacaagctacagtaagtaatacactgtataaaccaccacaagggcacagtggagcaggaaataacgcaaacactgttttgactgtttattttaaattgagaaatgttttaaagatggaaattcaaatattatcctctaagagccacaacacaaacctctggattcctatctttcatgacaaaaagtacatgcttcctcctcccttgtaagcatgcttggtgaacttaatgttctgggcataccacggccaaacaggaagtaaaattgtccaagaaaagtccacaaaatatctgacattctgacattttatacagaaaaacactgaaaagagactcttaacttaaaaactagcacttgttttaaatgtaaacatccaagtataattttaataactattcttaactcatgagattttgaagaataagacaatgtcatggttctttcaaacagggcacttacacaaaaatgcaaaaagttaattcatattcattgatcattaagattgtgtgtgcagtatgcttctgaatgtttgtggtgggtgtgctttttacatgtatgtttggatgtgtggatgtgcttgcctgcatggacatgttgggaggtcagaagctgacttctggtggctgaccctctatggctctccacttttttcaacacttttttcggtttctcactgaaccgaagctcaccatgttggctagactggctgactagcagcccctgggatctgcctgtatctgccctacacagctctgggagctacgggaacatactatcacacccagctttgacttacacatacacataaaataaaaataaatgaattttcaagaagttggagggagggggctaaagaaacagctcagggttaagagcattcactgctcctccaaaggatcctaatttagtccccagctccttcatggagtcttacaaccatccttaactgcagttccagaagacccagcaccctcttcaggcttctgcaggcatgcacatggtacacacaaatgcattcaggcaaaatactcatgcatataaaaataaaacagttgatcatctaagtcataaagttatagtgaagttcagagagttgaaaatttccagagtatccacactggtcacagaaaagagttaaaatcaacaacagaagaaaaatcataatctcccaactgaagaccatccagcttttctgctttggttagtctagccagccaccctggttatgtgaactcatccgcacactgatgggtctggttatgtgaactcatcctcacactgcatgagtctagttatgtgaactcatcctcacactgatgggtctggttatgtgaactcatcctcacactgatgggtctggttatgtgaactcatcctcacactgcatgagtctagttatgtgaactcatcctcaacactgatggctctggttatgtgaactcatcctcacactgatgggtctggttatgtgaactcatcctcacactgatgggtctggttatatgaactcaccctcacactgcatgagtctagttatgtgaactcatcctcaacactgatggctctggttatgtgaactcatcctcacactgatgggtctggttatatgaactcatcctcacactgcatgagagtctggttatgtgaatttatcctcacacttttgcaactagtgttttacacactgagcaatcccacccagacctttttagtgttcttgctttttattataattcccttttttgccctgataataaaagtaaatcaacaaaccaagttgattatatgtcagtggatatataatgaatagagatatacgttaagtaagaacatgaagatggagggacagaaaattgtatgtaagtatggctttcatgtactattgaagtcagtgtgacattaatttaaatagatgattgtaaatttaaagattcactctaatctttagtgtaacttttaataaaactaaaaatatgtaacaaaagtgagactcagaattataaaccacaaaaaataagcacagaagtaggcaatgaagaaaaatacaatagccaatagccctgtcttgaaaaacaacaacaaatatataatatagaaaataatgaaatgataaaaattagtataccctatcactatttcaaatgcaagttcatgcaaatagcccattaatggcagcaatttctcaaatggataaaaacacatggtttaactacatgtatccataagagactcattcaaaacctaaacatgcaaacaggttgaggggggagaaagtcggagaacaaaatctacacaaataataaccaaaaggaagctagtgtggttttaacaatatcagaaaataggatttaaagtgaaaaaataacaaagataagaatatattataattaaagaagacataacaaccaaaagacagaacaattatcaccacactatgaaccaaaaagaagtaaaggggaaaagagacaataatagttggagaattcaacacactattctcaataatggacaggaaaactacaaagaacaataaaggcaagaacttaaacactacaaagcaactagctgtaacagccatacaaaaagctttgcccccacacaacacatctttaagtgcatgtaaaatacactccaggtttgtacagtctcaaaactactgtcaatgctttcataaagttaaaaccatccaaagttatcttctctggctagactataataagtagaacattaaaagaaaaatttaatttcacaatacattagaattaatcactcaaggcaggtgacagaggccacccacctctgaggtactgagagcatgtcagcactgttaaactcactagatgtgtcgatggttaggcctttgagttcttactgtaagccttccctctcatgctcactttcctgtaaatgagtagatactgaagaatagggcaatttgattccctaattggcagctgttagactttctcttcctgtcgtggctgcctttaacaaacagccggataagcagccagctggactacccttggccaacactggccattctgagcactccgtggactccttaagaaaactacacaacggcttttccttcctgctcttgaagtggtctcagccagcactacttcagaaggttgtgctgaacgtttcctgtcataagccctggtgtactgaggatgatcacctaaccattcccaccaggccagagcaaagcacttcccttggcagcctgacaaaggactctgtgactggaaataagggacagtgctatgactggtgacagtacaaaccttcctttacatgcaaggttttctgtgattggttcaaacacccctagctgtatcaaataagccagctaagagacatcatcctattctactcccctctattttaacattaagcccaatgaaagagtctcttgaatggccttttattgcctatgggttgagctggtagcaggaagaagtgacagcggcagcagcttagcagttggtggactcagctgtaaaaagcaacaatgtaaccaaatgcttgacagctgaagaagaggcagaacagctcctgagaacaaaccccacaaaggagacagctgaagtacacagagaatagaggccaggggctcaagaataaaccaattctgtgaagagcccaagaagaggaactgcaggcccatgatactgggaaccttctggagacctgtcagacctttcggacaagggtctcagataccccaacctcaatgttgtaagaacaggcactgtcaagggccgaggaatgtcaatacctaagattgcctgggatctacaactctagttgtggctaagggctaagaaacaccaacttctgtgggcacataagagctgcaacatttgtagagctaagaacaccattaccagggctacacagatctgtaactctctgagcagtggttctcaacccatgggtggcaacagctttagaggtctaatggaagtttccccagaacattgtagctgacttgtattttgaagtgttagcacctgggctttgaactgccttttgtgatggtaccttctgctgctgacatttttgtttgaagtggtttggatatgcggaaattgacttgccaaggtgtaaattatagaacaataaaaaagatctttctctgaagcaatgtcagttagttccccagaaactggctcccctggcaattcatcctggattgaccctatttcttccaaacacagcaaggttgcaggtcagctatcctgtatatcagatatttacagtaccattcacagcaatagcaaaattacagttatgaagtagcatatggttggggtcatcacaacatgaggaactgtattaaaggattgcagtattaggaaggcagagaaccactgctcccaactgccaatgctcccacttgcttcagtcaaataccaaagaaagtaaaatgactactggctaaccctgagagactctggagcactcaccatgcatgggatgtccctacgacatccctcctctcaaggctcaggcatctatgaggaagaggacgaggaaatactttaagagccagagattggtgatttaaaagaataacaatgctttccgaataaaaggggactgatgcacacaggaactctcagagactgagactgcaaataagacttgtacaagttgaaactagaccaaatcagagcacagaaagaatatgaagttgggaggaggtggtggaggggaaagaatatgattaaaatatatttgtgtaaaatgtttttatattaaattaggtaattttataaaatacaattgtaacattaaaaaaagatggtaatgttccctcaatggatctatatatgtgatgcaatcactactgaaatctcagctatcctttacgtagaaatgacaaattaatcacaacatggggaaaaaaaagggactaaaattgccaaatcattttataaaagaaccataaaatttaacaactacttcctgtttacaaaatgtgctacagaactaaagacagttgagtcttaggagcacctgagtagcatatgccagatactagtttcaaactgcaacgctgaaaataataaacagtaacatactaccaagccacactgacccaagcagtatggcaatggcatcaggacatcaaacatttaactacactgcatttcaacaaagtaaaacaagattttgttgaacttaaagagagagagagagagagagagagagagagagagagagagagatagagagagtgcatatgctttaagttcaagacttaaaagtatacatagctacatagctctgcctatgctgaaacccacaggctttggcttctccctcctgagcactaagattaaaggcatgtgttactaagcatattttcatagaatacttatacatttaaactaaaattaaatatttaaatgattttattgtgtagtctttatagctcttttttttagattaaaaaatttgtatatacatgagtgttttgccttcatgtgtctttgtgtagcaccaagtgtgcctggtgctctcggaggtcagaagagggcaatggctcacagggagatggaattatgggttgttgtggttgctagtaaccaaacctaggtcctctgcaagggctccagttctatatgcttagttttaaatatcagcattattagtagcttttgtggatgggtgagtgctaaacaagaaaaagggcaagcaacctactccctctaaaacaaagctatgaagaaagtataaaacattccattaacttacctttaactgtgtcatgaaaagaaaaaggctcatcaaagacaaaggttaatctttgaaatggtctatgcaatctagttttacacttatataattcttttcttctttgttgctctataattactagtctccattcatttaaaggaactatataacattactgaagtagaatgggttttgctatatactttatccttattcactggcttctaaaatagaaaatgcaatagataaaatagaataggatgatagctacattttaggtacttatgccttttcacttatatcctgaatctgataaataaaaaattatcaatgatactgaacaggccaagcattttatctgatctttaatatggactgagataaaactttcacgaaaacaaaatgcaaaaattttagatttaaatttgtatgtttacaagtctacatgtatgagtgttggtaggactcaactcagggccttagagctctaccactgagaggcagccccagccctactttaaaaaataataataaaaaaaaacagctttaaactagtttaaaaatcaagaacataagctattttgaaattcctaccataactttcttagagagctgaagaggtagctcatgggtaagggcacttacttcccaggcacagcacttgagttcaaattcccagaactcatataaaaaggtgggataaataggtgtgcttgcctataatactggtactgtgaataagaacgattcctacaagctcacagatttgaatgcttagtcaccagggagtggcactatttgaaaggatcaggaggtgtgaccttgttagaagaagtgtggcactggggagtggacttcgaagtttcaaatagccaatgccaagccgagctctctcttcctgcagctctggatgtagaactctcagtgcttctccagcaccatgtctgcctgcctgcagctatgcttagccatgataacttgatgacaaaagactaaacctctgaaactataagcaagccctaattaatttttttcttttataaaagttgctgtggtgtctcttcacagcaacagaaagaacactaagacaactgtttcactgagtttcaacataaaattgatttcaaggtataccaaaagaaagagagagagagagagagagagagagagagagagaggcaggggtatatatggggttgatagagaatttcaggagctgaaaaaatgatatctatagctgtaaaatatttaattttatccagctgctggagagatggcttagcaattaagagtactgaataatcttgaagaggatctgggtggcagttcacaaccatctataactcagaccctcttctggcctccacaggcaccagacacataaatggtacacagacatacatgtagtcaaaatacacatgcacacaaaatgaagataaataaataagaatgttactgaaatacgtattccaacaaactgatagtctacttccacactgttcttaggatgtagtttcaggatttacatatgaagatggagatgatagctcacatttgtaatcccagaatttgagagaccaagacaacaggcaggttcagggccagaccaacttgggctacatatcaaaccctatatcacttaaaaaaaacaagatttacttatgagatatcccatgacaagattctttagtacctactatgatctcaaaacatttacgacaagattctttagtacctactatgatctcaaaacatttacaggcttcaatttgttttgacatctactctatggcaatcactttaaattctataatgttattgtaattgttatgtatgtaaaaacacaactaatagccataataaattacagatgtaaattgtaatagagtaatataattaaaataataacctataaataagaaaatatgatttttaatacctaccacaagctttagaagcagccacacaaatttcttctgcaacatactctccaattggaaacttcagatagtctccttcggctttcccaagagaatggtacagatacacttgaaggactggatctatctgcttcacagaattagcatttccaggaatatcgccattcggatgtacaggagatgtggaggtggcctccatttctgtcattgtaaggcaagccattcccatccagagtccttttcagaacattggcctattagagaaaacaatacagttaccccaaaaaagtctattagttaagatatccctcatatacacggaagtcttattgacagccatgactctatcaaagtgatcaactaagaactgtacatgactacacagaaagcacagcacaagatcccagagcttcaagtggacaatgataaaattccagctgtaatcctaacaggggaatataaatgtgtagcattgactaaacaaacatgagctagaaatggctcagccataaacagaatttactgctgtgatccactttgattcctagcactcaggtcacaggtggttcacaatcctctgtaactccagttccaagggctccagcaccctcttctgctctcttcagacactagacatgcaggaggtacacacacacacacacacacacacacacacacacacacacacacacacaaacacaaacacacacacactctttaaaggagcattagaatccatcatagatagcagaattcacacataagaaacttccttactatatgaattaccctgagaattgctttattggaggaggaaataacattttagatgggaatgatctcatgagatttattaaagaatgtcaaatttaaaattgattttgaaaaattcattggatttagatgtagtccagggaagtacactgtactgaagagtggaccagtattttatgagctcaacagctcattgggaaaagtggaagcacagatgagtatctgtggcagcattgctagcatttcctcctcctttgaaatggacgctcaattttgttgggcatcactgagtgctcaacagaacactacttccttactaatagatagctatgcaaatcagtttcaaaaaataagaatcaagaagttactagggagctttttgaggctcatcctgccagcatgcttttttctcttaccttctttctacctgaatttgcgcaagaattttaggacagagtactcacctcaaaatcatgaggcaatcatgaaagaaaggccaagagataacatacttggacatgatcagcagctgaatcagtgtcaggaaccatctatcttccaccagacatctcgttacttacaatgaatacaatcttggctaatatagtacaaagttaaagaccaaaacaaacgccaggccaaagaatttaaactttataccacagactacaaactagaaaggtaaagaaatgaagttagaaagctgcggctgtggtataggcaacaggagatcatgaatgcaaacagcattgaaagataatgggaggcaacataaacacaagacttaatgctacccagtgactaactgaatgtgcaggaagctaggggagtgaaagacagtgtacagagttcaaactcaggagatctgaaaactattaacgtaaataaggatgttgacctttgatattacaagacaaaaaagtaagtactgttttacacattttcatttttcatttacattgtgagagacaattataccaggatgtaactggcagctaaaatatgaaattgccttcttggaatatttcacaactgaggttaaaaacttgacaatctttccaatatgtgttatcatggacataggaaaatactggttataacagcaaacaaaagccaggagtggtggtccatagaggcaggaggatggctacacaatgagagtatattagaaagagcaaaataaataagtaaaaataacattcaacaaaaccttaaagcatttgctatgcacaaagcactgctctaactactacagatagaagggaaaataactactaagaaaattacaagcctggtctgcacaaggagttccaagacggtaaagagactccgtttcactctgaatatgaattataacttgggtatggcacatacctttaatgccagcatttcggaggcagaggcaggaagatctctgcaagttcaaagccagcctgatctaaatatcaagttctagggcagacagagctacacagtgagaccctgtctcaaaaaaaaagagaaataattacaatttgaaatatgtttctatatatacaaccataaggacttaattactaaagaaaaatttaaaactagtctttagttataaaaatctcatgaaactgtcagcatataaaataaacaacaacaaaaaccccaataggtaactgttggaacaggtacaaagttacaagctttctgaagattatctttgaataaatatgcaaaaccttaaaataatttaaatttgttcacatttatataattaaaaatagttttgtaattcatatgtagtctttgttagctctgcatgtcaatcgcacacagcaaaagcagttctataaaggaagttaacataagtgcttacataaagaccaaagggagatctcaagcaagctaacattgctcctcagtaatgagaaaaaaagaacaatttaagctcaaagttagaagaaaggaggaaataattaagagcagtgttgggttttgaacagatacaaggtcaattaaagcagactgttaattaatactaaagagcaattttgctaaatacatctgtctgtattcacattttgatcctacaactttctctggatttattttttcctgctgaagtacatttttttagtagtctccttggagttttcaatgtctttgaaaaaagaatttccttactctcaaaattctatctgcaggtcttctgctccgacacatataagactttactgcactgctctgtgtctaccggagcagtcatggagtctgctgtcatgtctttccatctagcaatttaagactttaagttctgtttaatgcagcgaagtttgacagtttcttggcaatggtgttagcttatttttatttatcatgatgaaaatttccagtatgcttttaatcaaaagcttcatgtctctactttctattccagacaaatctaagcagccaggccttcaaaagttaccattttgtcattccctccaatttctattagcagccccaaccctgtttatcacaggagcctctcaagctactgccacagccctcagcggctcttgcttatggtgagataggacaatggttagcatggcaggactgtgacagtgtgggaacagaaaatgagcagcaggcacaaaaggccacctgatgttcgcattactctgcactcctgatgtgactgtcaggctgtacttagggctttgctatacttcaactaaaagttcattttaaaacattttaaagccaggtgtggtgtttcatgcttgtgatcctattacttaacaggctgaggcaggaggatcaccatgagtgtgaggtcagcttagactacctgttgaactcctggccaactgaggctacagaggaagacaactcagaaaacattttttttaagatctgaaataaaatggaattattttaaattttaaagtggctatctttcttgaaatgtggtttgcacacacatttcactattctgcgccaaaccttaatcctcaacacatctctaccctgaaacacacacacacacacacacacacacacacacacacacacacacacacacacacacacacaaatccatattgttttcatttttccctaacaatttgtaataagtctcaatatagcctacctggctgtctatattcagaaccagttctgacaataccaagttagaatgtcttcctgaagaggtatttgatgcagacccagtcagaacaaaaataagattcttagctccatcttagcatctgaaaacctgcaccaccaactcttcttcctaagtctgtagctcacctaatgctactgcatcaggcagcatctggcgagagcttcaccaagagaagaaatggctagcagtaaactaactctagtccatgttaagcccccagtctctatacaagggacccagcaaggtgctctcactgcttgtacttgcaatctgaaagtgtgctcaccttggcttttttattttcaatcctgagggatttaaacatggagtctcacacatgttgggtaagtgctccaccactgatttttatatttccaatccttttggaagatattttaaaattctgagacagggtctcataggttacctacactagccttgaagatgttctgtagcccaaatggaacttgcttcagcctctctagtagctagtagcacaagcctgtaccaggcctggcaaccgacctattttctttctttcttgcctgtttgttttggttttggtttttgttattgtggggggaggggtgtatttatttatttatttatttggtttttcaacacaggaattctgtgttgttttgctgtcctagaactcactctatagaccaggctggccttgaactcacagagatcagcatgcctctgcctctgcctctgcctcccaagcgctgggattaaaggcatgcaacaccactcactactcggttaaattgacctattttcatccatattttacatatgcttatatttaccttttggattcaattatgcatttataacaaaaagatgttaagtggagcataccatcttaaacacacatgcatatataacgtaaaattccacaagcactcggcaaatgtttgtttcattaaaatgaattgagtcttttagaaaatgtacttttttctacgggaaaagaatcaaaagcacacataacttaaactggtccttttctgtgaatggaacacacacacatgctaattacattgcagttggtgccactgcattgatttatgctgttagttttagctaacagtgtttttgtagcatctatactagcgtcagcagtgtaaaagatgtctcagcagtgttattttaaccttcttgaatggcttctgaggatcacttctcccagttacaaaccctaaagaaacaaacactaacagacacactgcatctccacttccaaagtcacaacaaagcaaacaaatctccaaagaatcaaattattgagaaaatgaataaatactttgttgcactcactctatagaaaatatgttcctcagcagttcaaataacccatagctttttgttgtttgtttgtttgtttgtttgttttttcaagacagggtttctttgtgtttctggctgcgctggaactagctcagaggaacaggctggcctggaacactgagatccgcctacctctgcctccagagtgctgggattaaaggtgtgcgccaccactgcccagttaacctatagcttttgtgtaacaaagtaaatattaaaaatagaatagtaagttgtagaaaactttacgctttaagataaccattttaaataagctaaacaaaactgaataatccattaaggcatatgtacatatattaagccaaaaagaacattaaaagcaatggtaaactcaaaatatactagtgagagataggtagctgtaagttactgaccttgaatttgctaactcttgaaatgcaggtactttcaagtacttaattctgaacttgcatttaagttatttctggtctatatttataggatttccccctcgtataaaatgaaatgtacagtcagtcacaatctcatcatctccacagagctccctcaccacctgcccctgcccctgcccctacccagcagctatcagttctgacttctcaaacatttttgcttgtttactgatcttctttcatcactagactggaagtttcttgaaggtgaggagcatgatgtctcattaattacttcattcatagtccctggcaccaaaatgatgtcaaataaatgaagattaaatagaaactgtaatgaattttaattatgtatgtacatacatacattattttataatctaatattatccaaatttacccctacactttagaattctaaagcacttttcagacaaatgacaatgagaaaataacataatagactggtgaaagtataaacctaagccaggcatcgttggcttatgcctttaatcccagcactcaagaggcagaggcaggcagatctctatgagttcaagaccagcctggtctacaagagctaattcctggacagcctccaaagccacagagaaaccctgtcttgaaaaacccaaaaaagaggttggagagatggctcaggagttaagagcactgactgttcttccagaggtcctgagttcaattcccagcaaccacatggtggctcacaaccatctgtaatgggatctagtgccctcttctggcatgcactgtatacatgataaataaatttttaaaaagtattaaactagaagccaacagaactaaaaattacttggaattcattcttattgcaaactaattatgtttgataagggaatcttaccatcctcatgtctgtaattaataaatataaaatattcctcttacttcctaaagcctgtaatttccattcaattaaggtttaattagtactaaattcttcactgaagtgcagcagaggtgacaaggaaaagagtggccatgattattaacacagaggacgtttttaaacatttcttacacaataaaccatggactcgacctttataaggaaaagaattttaagaggccgggttcagggttaaaagggctcccaactcttccagacaacccaagtttgatttctaccatgtctggtgcctcatgactacctataagtccagcttcaagggagccgatgccctcttatggccttcccaggcacctgtattcccgtaacattcacacacacaagactggggaaaagagaatgtagccaacaaaaagcacagcagtattcgcagggaccagggtgttaaaaaaaaaaaaaacagagtgtagaaagaattgcacagcatgggtctggaacatacaggtttcaaaacagaactgaaagctagttaaatgatcagctgatgattttcaggtctccagttggctagaatcagaccacttgaaaacactagagtagagatataaaaaagcatttagtgtttctacactaacttggcaatatctgtgtgctgcaatcaggaacacataccacttttaatccaacaatccctcttctgtttctcaaacaaaatgacaaaaatactacttctgaattataaaagttgtatgtgttacttgctcaagaaaataaattttaagaattttaaaaagacaaacatctctttcaataagttttactctcaactaaatgaatgaaaagacctgcagtaactcactcagaatgtggtattatgtaataacgtatattggaaattttcatattttagtttatatgccaaattcagccagttgctctttttgtaaataaaactctactggaacacagcatgccagttatttatgtaatacctgtgactttttctgcattacataggcaccactgtagactggcaaaagagacaatcttgccaacacagtttaaaaactatctggctttaatagaaaaatattgacaacctagcttaaatcagtgattctcgaagtgtagtggtccccagatgaaaatcattgtctcatctggaaacaggtaagaagtgtaaatgcaagggttctactccagacccactgaaacagaaactctggagacagaacccaacaatatatgtttcaataagtccttatgtaattttaggaaccgttggagaaagggatagttctacagtagctaggaagagatgaggacccacctaaaatctgtcttgaaatgaataaaagcttaataaagcctcaaggagagtataagaaagggcttaacctgaagtgaggacaaacacactgagcactactagtggagattcttctcaggtaatattggcaagctttacctacagcgacacagacagtacaaacacaaggcagttgctctatgaaattgtggggtggggaaatgcaaagggctcaaaaaactgtctttggggccaacaaagtattattaaagtaagaagggcagagacctggttgccagggcaacagggaagcaatcagagaagtcagcatcacagcatcggccctctgcccattagtccacgatctcctgcaatccaaaccctggtaacaaaggctttaacacaaaagcctttgaaggacattcaagatccaaattagagcagtagtataaaataaaaataatagttttcatttgagacaaaaagatcattaaaaacacagtggcaagagacctgtgcagaatacaataaacgctatgaaatgactagagtaacgagtgcacaagaggaatagttatagtgtgagaacctagcagaaatcatacaggcattattagaagtactacattaagccattcactatgaactgatactagctttggatcaaaaattgtatcagaaaagcctattgcaaccaaatgaagatgtttccaaattatcttcatttgggaactcctgaaggttagcaatttcttcccgacgttttaaaccaaggaaatactaaagtaggctcaaacaacttagcattaatattcttagggtttagtgttgtttggtatgccaacaaatcctcaaaccttggtattgtcatttcttgttccacactaactgtcatgcactaaatagctgcttgtcacagagtaaaccctgaaaaggcagctttacaaagacacaccactgtagacatgaatggagctttctaatcctgaaaatacccgagtaactggtggaagcccgagcttttgggtgctctaggtacctggcaaacagtttgggaaactgagaacgaagtgaaggagcctaaaaaggaaaaacagtgctacggaggaggaggagcaaaggaaaattctttgcacggttatccacaagagggcagcacaatggggcttaggcggcaaacccttccatacaaaggctgtaaattcactagtatgcagtttcctcttactctaaggaagaaaagccactggtcagtgacctgtgcaccatccagctaggaacctcctgtacctgcccaactatgagtagctaagactttcagaaagtggccaaaccatttgctactttgcatgcatcttatcaatcctcccacaatcgtctaagaaaataaattgttaagtaatacagctgttaaatgcacagaacaccatcactctaaaccaagtcgacacactcagacctaactcgaaagccagtggtctttcctatattgccagaaaatgataccatctttcaagaataacctatctgggtgaagtagagaaaaaatatcatgttcactttccatattgaagacaccttcagatcacaaaggaaaagacactaaaagaaacaaatccaagccaggtggtggttagtggctcctcaaacctttaatcctagcattggggaggcagagaccggcagatctctgagtagcagaccagcctggtctacagaacgagttccacaacactgtgtaaaagcaaaaataaacctaaatgcttatctagccaacacatactgcagctctcctgtacaggtaaatgctctgtggcactattacatactcttatgatggtaagtcctggacacatccagtctgcagatgtagcacacacaagcaaattcacacacaaccaaatgatcctaacacttgggatggatgggaaacaggtgaagaacatggagaaagcagaccaaaaactggtgattcattttcaaatctgctgtgaattgtatctgaatatttgcagtaagccaacagctcacttgtacaaacctattatgaaaccaaaagcaacctccgactcgcttattcccacttctgttttccttctccacatttctcctcccctctgtgacacactcagctgctcctatcctttcattcaggagtttcccctgacagatgaataaccggaaagcagactgcgtacattcaaccgacaaagcaagcttaggcaggtgaatacaggaaacattcggtgtgacaacagacacccagcaaaaacaaccaatgtgtcccctcaataggtatttcttattacttggaaattaagactcgggctacctaaagagaaagggacgatttatttttctccgcactgtaaaaccagcaaagaatgcttcttaaaggatccaagagacaaacacaataaataccaaccaattactctcccacagcaacaggaaaagttcagcactcccatgttcggagtaagcaacaattagccccgctgttctacataagcatccagcctccctagcaagcactggcttgtagatcgcagacacccttgcctttaactgcagcgaccacacaaccccgagctctcacactcaccgtcgcgggaggggaaggaagggcctcttcttctggggaggaaaaacagttcacatcttgctccggtcgcctgtttctggaacctgaaaacagaagcagcagtcactacctcagaaacccagggcaaatagatgctctttttttcccctccttcccggcgctatttagatgcctagaaaaatttacagaaggataaggaagaggggatcgggttctagggcacacggggatgcctacatttatcaacagccagacactccttcctaggttgctggaaacccgccctgaagttccctgtcagcagcaggggcgacgcggagagcaggaggagggatcctcgggagagccgctgcccacccccactcccgcccccagcccgtagcgagggactgaacccaccggcgacacggctcgggccacacaagagcgccccgaggcagcgcaggggctgctcctccgcgacgcgtcgggcgggccgaggtctagggagcccccgggccgggtgcaggggcgagcggccgccaggctgggccctcgggggccctcccgagcgggctcggcccgcactcacatcccgcagtagcggtcccggcagccgccttgcagccctcgccccgacgggcacctccgggagccggggccgcggccgaggcgccgacgccgccgcgcggagctcgcccagagcccgggcccgcccagcctgtcagcgcggcgggaggccgtcggcggccgcggctgccccctttctgctctgcctcggcttcctgcagcccacgccacgcccaccgccgagcccgtccccgccctcccgggccgcacgccccctcggctcggctggggacgcggctcggtcgcccctgcgcggcgggctccgtggcgggtgctgcctcaggcgggcggcctagcgaagcggacccggggcgcccgcaagccagtccggggcgggcgggggggggggagcggcacgccccactgcgcctgcgccgcccgcccgccgcccccgcgcggcgccgctcctcccgcctgggccggagccggggcggggaggcgggccgcggctgcgggctcccgggaagcggaggcgcgcgtggagattcccggggcagcccccgggcgtgagcgcagcgcagcagcagcaggaggaggaggaggaggaggaggaggaggagcggggcgggtgcgggctggcgctgccttgggcgagcatgcggcctccgctcgccgacgaggcggctgggaatgagtcagccgagccgggaaggccccggtgcgcctgggctgaaagtgtaggcggccgctgcctccgcggagactcttctctccggatctcgccgcaccctttctgctttcgcttccacgtgcacgcacctccctgccttaatcgctcgcccaggggacttgccaccgtgcacgggccactgagacccgagcgcctgacttcagtgagccaccacttctgggaagaggagcgggtggaaggagaaaaaaacgactggcaaggttcccgagagccacgttcattcattcattcaagaagtcactgaccacctgccaggcaccaggctcccaaggataggagaggaaagcaacctttactctgtgtcctgctgacgcttgtagtctcgtagaagccacaagatatgcattaaatcctcactgcgctgggtgtgtgattgccagtcacatgtacacacacacacacacacacacacacacacaggaaagtgagtagaggtgttattttgggatgaccaggaaagacctcctagagtgacatttgagcagaaatttgaaggatgagaatggcccagtcctggaactatctggtttcaaggagctagcaatgacaaggattcggagaagggaatgtgtttggcacttttaaggactaagaattgtctatggaaaacagtaaaggaaaggggcaatagtaagaggacaaagaagtagctggctgggacgttttttactcgtagccctgggtttgtcgacccgagatgaagcatttaaaacgcccacatcatcttacatacataatgctgttattcggatcttacatctggtggtttattttcttttgcctttcctttttatttttgagtcaaggtctcactatgtagcacttgctggcctcgaattcgcagaaaccctcctgcttgcctggggaatgcttagatgaaaggtgtgcaccaccacaccatgcatggtttctttaagtaaacgtcaccaaagcaaaatgataaggtaggcaaggaaagatagatgatgctcgataagcttataggagtcaagtcctctatcagcccacacagaaaaattaacttatttgtcctcatttagagtgaaaaccgctctcgataaagcaggactgagccggtactaatcttgaatgttgagccctttttactctgtgtaccagagatctttccaattcttgatatgattcctagtagtggcatagctggagatttgttccacccgataatcatttcacaaagttaccccctctctctgataacaataagggagagttccaaggaataatgacatttgaaaacgataagcaagaggtagataagatatttagatttagaccttttttgcatgggcagattcaaaagtaaaaattaatagccaagtgtcggctgcagcaccggctgtagagccagggggcaagattctgtcatttcactgtgggagagcatggtagcagagctgcgttccacacccaaacataacaagaccgaatcctttgtgtgacatcagcccctgagttctatccctttttatagttcttagaagttgtgccaagaggcgagctggaacgggaagattctgagttcaaggccagcttgaactacaaaataagaatttgtttctgccgggcattggtgggatacgcttttaaaatcccagcactcgggaggcagaggcaggcggatctctgtgagttcgaagacagactggtcaacacagcaagttccaggacaacctccaaagcaatacagagaaaccctgtctcaaaaaacaaaaaaaaaaaaaaaaaaagtgtttccaagcaagcataggttgaaaaaaatccatgatgaagggttcccagcacccacgtggtggctcacaaccatccataacttgggatcccctggaactgaatccaaggcccttttctggcctccttggatatcaggcatacacagagtgcactacatccaggcaaaacacccatgcacataaaataataaaaccaagaaaagttttacaaaagagtccaggtggctcagatttcagtcaaggcttttttgccaagacaatcatttccattttgtaagcttcctgttgattcatataacgaagaatatacctctcccatcagaatatgggggttgagtataatagcaccatcatacttaaagagaccttttgaagattggagggaacgtattttaaagcccttaagcacagctattaaatgcctgttgtggccctggaagggccaacctacagacaccatcaagtgctccattttatcagtattcctgaagacttttgtcacaattgcaccacaaggaactaaaagcagagttgtaagaaagacaaatgcaggaatctgcatttttactgcatttttattaatttttaaaaggaatacaaagtaatggatttcattataacatttattataacgttttttatacatgtctcatcactttcttctgacattttctcttccctctgccctctcttaacctcctcatccccctctaccccatccttttcctcctcttaaatagtgcctccttctgttttcacatcgtatatattctattaccctttccccttccttcccattcaaagttcttcctcccctcctgtgcccccccacacacacacagataagagttcatatagagtgcttgtgattcatggtctggcttcatgcaacagaatgatttttccgttctgcccattttccttcgagtgtcacagtttcacttgtgtgtataaactgtgtttctattacccgcctacctgctgatggacacgagggtccacttcctagctattatgaataatagtgcagcaattatatggatatgcaagtatttctgtggcgtgtggtacaactggattatatggtagttctattttttgtttcttaagggactatctgtcacacttatttccatggtggctgcatgagtttatattccccgtgtgtaacagtgtgtagtttatccaaccccacaccctcaccagtatttgtcctggtttgttttcctgatgagatgggatctccaagcaattctattctgtttaaccctcatggttaaggatgctcaacatttttcaaatattcattaggcaattatacttgaaattttgaaaattgtgtactcagtttattagccagttgtttgactgagttcttttgatatttaattctttcagccctccacatattctagatgtaaactccttgtctggtatacagttggctaagattcgtttgaatctatagactgctcttcactctgtaatcccatttcctgtgctattggagaccttttcaggaagtccttgttcttgtctttatcttgaaatgtgttactatattctcctgaaacaatttcaaagttccaggtctggtactacaatcttcaatgcattttgaattggtttgtgtgtgcatgtgtgtgccgggagaaagctacgtatctagtttcattcttctatagtcaaagttgagttttcccaacaccatttgttgaaaaggttgccttttctcccaagtgtatattttacaactttgtcaaaatgtgtaagtgcagagctgtggttttttttttttttctgggtcttctattccactggtctacgtgtcttttttgtgttggtgccattcagttttcgttactatggttctgtagtatagtatgagatcaggtattgtaacagcaccagcattgctcttgcttcgcgttgctttgattattcaaggtctttgtgcttctgaagaaattttggagttgttttctttttctagttctgtaaagaatgctaatcagaattttgatgggaattgtgttgcatttgtatataacttgcagtaatatagccattttctccacatgaattctgacagtgcatgagtatgtaagaggtctttgtgtcttctggtgcattttctttctgtggaaactaaaacattaaggtccgtagtctttagtctccttggctgggtggttaggtttatttctaaatctgtttaaactattttaaatagggttttccccttgatataacaaccttggcatttttgtatgtttattttgtgtcttgattcattggtgaaagtatttatgaggtctaagcgttttctggtggcgccattgtgtcttttaggtataggctcatgttgtctgcaaaaaaggcaagtatgcctcctgcctttcttattcagatctgcttttcttctctatcttgtcttatggctctagctaagactttgaacactgtgttgagtagggctcatgagggcagtacccttgtcttcctcctgacattagaggaaaagatttcagtcttttccatctagtatagtgttgtctataagcttgttgtacgtagcctttactatgttgagatatgttccttctattactagtttctttgggggctcttcttcataaagagatgttgaactttgtcaaaggacttttctgcatctaataaaatgatgatatttatgttatgcattgtctttgtaaatattcaaccaaccttgcattcctggaatgaaaccaacttaatcatagtatatggtcataatgcatacttaaaaaattagtttttaagaatgtaaaatgtttttgttatttttattcacgtgtatatgtataccacatgcatgcaaatgcctgagacaagatgagggcattatgtccccctggaagtaggattacatgcaaaactgcctgagctatctctctagctgtaagttttcaagaactttattgaggatttttacatgtgtgttcatcatggaaattatagtttccttctttgttcttgtgccctttcctgtcttacatacaagagtcatacttgtttcatagtgttgtttttcttttctttctaattgtggaacagtttggtgatatttggaatgggcttttcttgaaagatttcagtagtgaatcctgcatttccctcattagaggcttaatctctgcatcaatcttgttgcttactatagatctgtagaagttggttatatggtcttgatttaatattagtatgtcatatgtgcctaggaatttatcatgattttctagtctttgaaactcaaatgttcaaagtatttcttaattatcctctgaattttactggaatctgttgtaacatccatttttttcatctctaatgtcattaatttgagtattctctcacatttctttttggtcagtttggctatggatttggcaaccttgtttattttccaaagaagcaactcgttgtttggttgatttcacgtactgttcttttcgtccctgtttcactaatttctgctcagatctttattatttcttgctgtctgctgctttgcagtttggcttctcttgtctgtctttgcacccttgagacacatcacttggttgtgtatctgcctgcacactgatattttttctatgtaaacgctcacagccataaactttcctgttagaactgctgtaacttcatctcaaagataccaataagtggtactttcatttttgcttgattttaagaatttttaaaaatttttccctttggatttggtgaatggcccactggcccttcatgaatatagtattcagcctcagtatttctgcagtttctgtggcttcttctgctgttgatttctagtttcactgcaatatgatctgataagatatgaaaaattagtttgattttcttctgtttgctaagacttgctctcttagggcaggagagatgagtcagtggttaacagcactggctgctcttccagagcactggggttcagttctcagtacccacatggcagctcacacctgtctgtaattccaggtcaaggaaatctgacaccctcacatagacaaacatccaggcaacaccaatgaatgtaaaataaaagtaaattatttaaaaaaaatacttgctctctgacctagtatgaggtctgttttcgagaaggttccaaaggttgctgctgtgatatatatgttaagtcctttaatctatagtgtagtttaactatgacattcctttattagtttttctttcaaatgacctctgtgaatatgtagttgggtcactgaaatcacccctcttactgtgtcaggatttatctaaactgttatgttgactagtgttggttttgtaaaattgatagtgcctaccctcagtatatatgtatttatatcttctatatcttcttgctgaaatatttcctttaatatgtagtaggaccgactttatctcttctgactaaatttggtttgaactctactttatcagacatcagaaaagctatgacagcttgttttccgtttccatctacttgattgattcactcccatcttctgactctcagtctgtgggcgtcttttgccggtgagtgaagttttttggggacatcagatgtttggatctagtgttttaacccagttaggcagtctacatctctttattggtcacctgggataatctgtaatgggtgattactgggagttgtttattaagtatcgtagctttgggttgtgtctttgccagttctgtccctcctttgctcttagctgttttagtaccttggatgtgctggattcctgtctagctcctttttgttctattcctctcagtaaatatattctttcccgtgctctcttgattgagactttttctctcctctgtgtataatattccttggggatgtttttagctttactctgttttgctttgcatttttgatttgctagtcatatgtttgggttgtgcttgtcttatatgtccacctctctgtcaaagctaagagatagcttcactgcagatagcaatcttggttgccagtcctttgctttcagagtttgacatgtgctgttcatactttgcttgtttttggattgttgctaagggaactgatgttattaaaacatgtttgtctttgtagatgacttggcatctttccttaaaaccttaaatattatttctgtcctttgtagtcctaaaatcttgactatcatgtgatacaaaatgggatttctctggttatatctacctggaattctgaaattcctcttgtgtttgatttccacctttccctagatattgggaggggggtgttacttaattaagtagattctttatgtctttagttttagatctcatttccttttccatttcataggttcttgggtttcgaccactgatgctatcccagagttcttgcattttatgccatgaccacttttttcctcactgatactcggtggcagtgcttccttgcacttgtccccggtcatcaccactgttcttttttctgcttggttaagtctgttaatgacactttccattttgatctgtttgttcccttgaaatgttcatttccaaatcttctgtttggttttatccaaatctccatttccttgttcatcttttttctatgttgttcacttttccctcagtagtgttgattgaaggatttctcatccattctgctcatcatttcctccgctggtgtgttttcctcctcgggtcctagctgaattcctttgcttgtctgtatcatcttttatagcatccacagcttttgaagtctttttttaaaaatgcacctgacatttttaactacttcagtatgtttgaattcagtgctttggggagttacaatatttgggagcagtcctattgcttgaatgtccgtgtttcttgtatttctacattgtgattgtttatgtctgttggtttggatttttttttttttttttttttggtttttcgagacagggtttctctgtgtagctttggagcctatcctggcactcgctctggagaccaggctggcctcagactcacccagatcggtctgcctttgccttctgagtgctgggattaaaggcacgcgccaccaacgcccagctggtttggatgtttcttttggtttgttgttgttgttgttgttgttgttgttttatttagaagtcttcttattcagcagccattctttgaagtctcaatccccctagtgccatttatagaaaataaaacaaaatgatataatacaaggaacatcaagccatacaaaataaggcacatgcttaaaactaattaaaaccaactaatacatcaccactgtccacaaaacaaacaaaaaatggcaaaactaatactgacacaagattaaatgagtaaaaagagaaaaggagaggatgagaagaaaagagtaagatagcaggaaaagaaaaataaaacaaaccaaaatatctcagtattaaacacataatgaaaaaatttaaaaccaaaactaggtaaatgacagaaagggactaagaatgaagcatggattttaaaaacaatatgagagccgggcagtggtggcacacacctttaatcccagcacttgggaggcagagacaggtggatctctatgagttccagaccagcctggtctacagagtgagttccaggacagaaaccctgtctcaaaacaccaaaaaaaaaaaaaaaaaaaaaaaaaaaaaaaaaaaaaaaaaaaaaacctgagaaagacaaaataccactacatttatagtagaaaggggaaaaaaaggagaggaacagaaggcaaaaaataagaaagaaagaactgtataaaaagtacaaagaaagaaaaacatgtctgcatgtttgcagaaaaaaaatctgcaaacagtattatgtgaacacaaaggtaatttttttttttttttaggaaagtatgttaaaaaatactgctgaaagtaaaagaaaaaggagggaatacaggcctgaatcatcttccttctttgtccttggagacttgagactgccacttacatgcatgaggtcagatcattcccatggtttatactttattgcacctgtactgggcaagtatccagtgcctgccagagttgtcctcattttagtaggttcccttctttgcatatcagaggcctctgctggccacactcgactttatagtatataggtcgtacagtctagactccccagactgcactctctctgtggctagtgttccagcagacggtgtctcccgaatggggaagaaaataaaatcactgagatgtgtacaagcccaggaccagcctttgtacttttaaggccccttagcaatgatctgctggaggggtgcagcttgagtatcaagtagccacctggagcctgagctcgcaccctccactggatgaatggcagacaggtgacttaaagactgattgacacactgaccttcagtcgcagggctattctccgtttcatcaacggaaatctctttgtgtctgaggaccaggctaccattccttatgcccttcactcccttcgctaaccctcctgccaccttcacccttggcttgtcaatgtgcagctgtcccattctccgcacctgccctggaggctgcctcacactatgagctgtgactggttggtcagtcgacttctcttggggttgtctctaccctcaggtctctagggaagcccacgttaagcaatagtttccttctccaggtgttcctagtccctgtcctgtgagtcaggcagaatgatagcatctgggaccattgttctgccaaagtccacactggatttgaggcttatgagggctatggactatgggcttatccttatctctttgcaccagagtgacctccttcaccttttggatgaggcttcatcaccaccaccaccccaggtgggtctctgttggtgctttttttccataacctacactacctttgtgggttttcaaaggtccccttctatcctgtgtttgaagtaaagtctattttttttccttatgataacttctctttcaatacatctcatctcctatcccgaaagcttaccataactccctaccctttgatttttaaaatgtaaaaacaaaacacaaaacaaaacaaaacagctatatcatagttggtcactatattacaagcctataatcccagcacatgggagactgaggcagaataattatgaatttgaggacagcctggactttatagcaatttcaaggcaaacctcaaatacaaagtaagaccctgtctcaaagagaaaccactttaaagagagctgtcattgaatgagataatgataatgactttttgtttgtttgtgtgctttttttgtattttgctgtgttttatttgtttagttggtcatgttggtgtgtgtgtgtgtgtgtgtgtgtgtgtgtgtgtgtgtgttgtggggcagactcttactatgtagctgggttggcacttgctctgcctccagagtgctaggatcacagggagcagtacacgcagaggaaacctcattcttagggatagcatgcatttcaaggcaaaggaaacctcattcttagggatagcatgcatttcaaggcaaagatttgagaaagtctccagctggcaaacagactaacacaaaggtctgaggacagatcccaaaagtatttcttttctttccaaaatagagactatatgcttttctgaaaacaaaaggcaactagtagctatggaaagagactaatttatttcagctctaagacaggtgtctgaatcaggcagacagacaaacaagcaacattttcttactttaaatcaaccaaatagttcctcttcagcacatcctcctcctgacactggtcctcaaagtgtttcatctttatagtcacaaaggaaaaggtgtcctgctgaacaaaacactttcccttgacatgagccaaaatagtgtgttagaaccaaatagctttctactctataaactctttcaggtaaggataattatttgacaaaatacacagaatgttaggtacaactttgctctactttcaacaactacaacattttttttaaattcagttttactatgtgcaccaagctgggctagaactcatgaacccacaatgtcctgagtactgggatcacagacaccagagtcaacaacaacaacaacaacaacaacaaaattgacttaaaatggtgagagttgcctacttactaaaaatagtatttttcttctaaaaacaagtccttctaagaccacggttaaaaacagaaactgaggcagacaggtcactaggaaaggagctcgtcaccagatacagtccttggaacctcaatggtagagacagaactgaatcctgcaagttgtcgtctgacctccacaactcttccaatacaagggaatgcacctcgcattcctgtgtgcggtgttgttgctgtttgagatggggtttctctgcataacagtctttgtagaccagtcagacctctgaactcacagagctacacctgcccctgcctcccgaatgctgggattaaaggcgtgtaccaccatacctgcatttattttatttatttatttatgtgtatatggggtttttgtctgcatgcacatgcattgcccatggagaccagaaaagggtgtctgatcttctagtcacagacagttgtgaacatgggtcccttgaaaaggagcaaaagctcttaactgcagagccatttctccaagttcttcagctttcttaattgctggcaaaattattaaatacagggtttattttatttattaatcaattttcccctatctcttcttcctttggttttgagacagttttttttttgtttgtttttttgttttgttttgttttgtttttctgtgtaggcttggctgtcctggaacttactctgtagatcaggctggccttgaacttggagatatgcctgcctctgcctctgcctcttaagtactggggttaaaggtgtgtgccactatgcccagcctgaaacctggcctttttatccagaatagccagcctctattgtctctctgtgagcttccctgctttcttcgattggactttagtggacaccagaggttcccttccaggacttggaattgagagtcacagactatacctcccttttctgttcccccacagtgaggtcacccacattctgaagttagtgttgtcttgattcttatgcatggagttgcccaggagctgactggcagagggagaagctcagggaaggcagccataagagaatgctggctctggagcttccaatcttttccatttagctcctcttcctgtgacccctgtaaaacacatatttaacacagttgcttcctgacaaatttctccttttttacagtggagtatgagaaacttttccaaatcaccagcattaaagcaaatgtccgtttatctttagacctcttttttcctctctttttccctttggtacctcctctttctgaagtcttgaacctatgcctctttatcttcacatcatgagagttgatgaatggaaggcagatgtgtacctctgatgacagctggtgttgaggaagtgctttcttggggtgattactttaaatcgattatttcctcgctgatctattctgagatcaattacaatagcacatacctgaatttgttttcccaaaagttgttttctttaaaaagaagaagaagaagaagaagaagaagaagaagaagaagaagaagaagaagaagaagaagaagaggaagaggaagaggaagaggaagaagaggaggaagaagaagaggaggaaggaaggaaggaagggaagaaagaaaggaaggaaggaaggaaggaaggaaggaaggaaggaaggaagagagaaagaaagaaagaaagaaagaaagaaagaaagaaagaaagaaagaaagacttcatcattctgggcttctattgagattattatagtgaacttctgtgaatcattttaaagctcattgaatctgttttacacacacacacacacacacacacatacaaaaaaaattacatatgttaatagctgtgatccaaaacagaccaaacttcagcaggtctagtatgaattgaattggctttcccaataaaatatgttgaagtccttaaccactagctcctgtgaatttggaaacgcttatttgaaaatattgtctctgcagatgtaatcaagtaacaaatgagagcactagggtggaccctgacccagcaggacaggaattcccaagaagttgcaggaaggagggctatgtgaaatacctgggggccatcagagaatgctggaagaagccaggaaggaacacctaactcccagaggcttcataggaagcttaacctctgctgaccccttagatagcccggctttcagaactgtgaaagaatcagtttctactgattgaagccatccaaggtgtggtaccttctagaacagtctagtgagtaatacactacacagcacttctcagactgaagcccagacaagtctcgggctttttttttttttttcctgccctgatacattaaatgttgcctgaaaattgacagagcgacctgttggagggggggaaacatcagcttccttattgttgctgcttttcctttggaacaatggtgtttctctttggtcacctgcacttgttacaggacgattatgaaagatgtgactgtcccaaggccgactttggctgcaagactgttggtatcacatgtgtcctcccagatgccaagtcagctcttccatgacacacaggaaacgacaacgacgttccagcaaaatcagctttagtaagaatgatgactgggaaaatttgtaagacaactgttaattgctgaaatagacatgttttaaaccttatgaaaatttactgttgtgtgtcttcacatctactatctatattaaaggattttaatgtacattcattgagaaaactaccctcctgatttacatttttaagtaaacgttaatgcataccacttgtggaaaactttaaacggtttggaaagcagtacacgaagtataaattcctcttgatcgttcccatctcccttcactttcaagaagccccactgcaggaaggcctagcctttgaaacttgctggggtgcattcccatacacatttccagcagctatagttttgagttctgtaagcaaaagtgacaatcctactacctatgtagcactttctgttatcagcttttcactctacataccttggagaactttcatttcaatatttatagttcatcctcatttgtttaaacccttaccgtctccaggaaacagatggctcataatttgctagaaattctacttatgggcatttagttttctaatttttcatagttaccaaagtaaatttggttagtatttacatacatttcaaagcacaaaagtattccccaaaatataaattaggctctctggagtaaaggaaatatgcatttaaaatttactgactatagctagactaacatttaaaaatatcatcacattaaaaatattttctaataaaacataataaaggtgttttgtctgcaaaaaaaaaatctcatcacagtagatcagagtgctttcttctataaccacatcaactcttgattattacgaatctttagttttagacaattttaatcctaaatcacattcattctggtagttcaacagatatttattaagcatgtagaaaacactcaggaaaaaacattctgataaaaaaaataacatgtaatagcaaagtgcatacggtatgctgggcattgttcaaaggatttatatctatttataaaacaaataaaaatagctctagtgtcctcatcatgctcagtcattggctgtgaagagcctggcaggggggtgggaggaggggagaaggctttcagcaaagaggctgccacagacctagccagtcactctaccctgcaactcacagcagtttctcttgagcagagaaactccgaaggtgacaatgagacagaagacattataagggcacagagctgactattgattctttttattttctggtcgatcaccgcctccatacatagagaagatcatgatcagctgacaaagaacggggtgggcgggcagaatgtagaaatgttggctttaaagataaaatggaggcatgaggcagttatctagagggtgggagggtgaaaggaccggggactctagctgattacttggcagaattaaaaacccaccaggctgcagaaaattggcatgagactcaacagcaacactgttgtgggtttttctccacccacactcagcaacgcaacccaagctcagaataaaaagttctactcaagcagggttggaactttcccaggtgtgaaagaggaagtgaaaccggggcaaaagttgagagtgcacgcaagtgactgctacaggttaaatattcatgtccagagtgcttgggaattggaactgtcgcagatttggggaatatttgcctgtacataatggcattccttggggacaatttctaaaactaagtataaaattcacctatttttttaactaggacataatttaaaaattatacatattttttgtgtgtcttatctcttgtaaaaagtggtgtaaattacaggctgagaaacggtactgaaggggaagcatctattctcacagctggtaggtaattctagttaaactgtgaagcacctgaagtcagccattgcctggaccaaacaaactgaaaaaaaaaaaaagaaaagaaaaaagaaaagaaaaagaaaagacatttggttgtggaattaatttttaaaaatctagaaaatagtaataacagtgttcttcctctattccttaatgctttgtatgtttcaagcagaagcgctatatgctacatttctagacgagattatatggtaggtcaaataatttggaacacactaaattacttctcaaaatacctagaacaataaatcttccctcaatgactaattactgggttgagttgagatacagcaagcccaggtggcagccccagctcttgacaaggaaggacaattctttcatcccattcttttagtcaataaggacaaaaagggaaattcctctattacatcagtgacaataatgcatgcacataaattatccaatctactttcatcatattttactctttattttgaagataccaaccacttatgaatccaccagtgccttgatcaaatacaatccaaattgtattcaaaatggcaacaatcttcaaattggtctaatgaaaaagagagcattgataaacatccatttaacttagaaaagacattcttagacacacttgtataccacaaggtatttctgcagagacatccacacatccatagcagagatcttcacatctgcacagcaaacttgaaaatgatgccttcccagatgaaagattatctttaacactaatttattactagaacttaagatttaacacatcccttagagagatgggctctggggctgggtgttttgttggtggtggcggtggttttggtgttttaggtttggatttctagtttttttccccacaaagtgtctggcatcaactctagttttacttccccttgggggaatgggaaggagggagggagttcttttgtagtggcatttatttttaaagtaggattttcaaactcgatgtcttgttaaaaatcgagaactctgctgtggtttaaccatcgatcttcaattcacagtgtgatgtgaaggcaaatagtatagaaatagcatgtgaagactttaagacagtattcacatgtgtaaataatgctacttgctttacaagcctataagtatttctttttaattatttgagatgatctgtttgcttattgtctgcccagtagactaggtcattgttttcaataaatttccccatcgatcatgtactcttttttctatttttgtttgtggggttttgattcgttgattcagtttccatatacaccctaggctaccttggaactttgatcttcttgtctcagcctcccaagtactgagattttcttcttccttctcttcctcttctctttcttttaacctgggttctggggattggactcaggtccttgtttttgcaaggtggctctttagcaattcaggtatctccctaccccatatatttacatctttgaagccctgctcaacaatattatggaataattttgtatttctgctagtcaaggtcagtttgggaagtttaggcaattgtcctatggtagggaaattaacttatatactatgtgtcttaggatttctactgctgtgaagagacaccatgaccatgaacaaccctaacagaggaaaacatttcatcgaaatggtggcttatagtttcagaggttcagtccattatcatcttagtggggagcatggctgtgtgcagacagacatgatgctggggcaggagctgctatatattgctaggcaggcaacaggaaatagactgccacactgatcaaagcttgtggaaaaagagacctcaaagcctacagtgacagattttctccaacaagaccacacctacttcaacaaggccacacctcccttcaaaggccactccctttggggggccattttctttcaaactaccatactatgtttaggttaagaatgaaacatcagattgttgtcttaattataaaattcttcttccattctctatcataagaataattctatacaggtctttgcatacattgtgttctacataatgtaagttttttttaatgtgcctaccaacttctgagtctccatttttcttttctttctttcttttttctcttttacaggacagatttacctacagtgttaccactgggactgtctaggttaggtacttccacccaatcattatttaacatggctgaacaatcgccctctagcagctgagccataatttaacatttcctgtggctagattttaggatgtaactaatttcccaatatgacaaacaactttgtgtaacagagtacacattttactcagatattgtttaatcttcagattatttccttagtataaattctcagaccattctatcagacaaaagggtgggcatactttaaaagcttttgcttaatcctgctaattgactgtgctgaaagctgtctttaattccactgttagtgtgtgagaagcactaacaaaatttggatagcattatgagtactgcttattttgtatgtgagcggatgaaagaaaaaaatgtgccttgttataattcttactctttgaatgttaagagtggtatggaacatctgtccctgtaggttaagtaaatgaccttgttttttcaataccttatccccttattattatactatgaagtttattaaatagctttcagcaaggactggcctattaaaaaataaagcagtagtctggtggtggtggtgctcacctttaatcccagcactgaagaggcagaggcaggaggatctctgtgagtttgaggccagcctggtctacagagtgagttccaggacaggctccaaaactacacaaagataacttctctcagaaaaccattaagaaaacaaaacaacaacaaaaaacaaacaacaataacaaaacaaaaacaaaaacaaaagaaacagccactggttttatgtggattaacctatggatttgcatatgactctaccccacaaggtaaatctgttactttctattttttgttttacaaaacaacatcagagtatctgcaaaaaatttttaaaaaaatcttcagaacattttacctgcatttacctgcatttatttagcttgatccaatcattgatggtatagacttagcaattcagcaaaaaagaatagtacatggcagactgggtgactcaaggtcagaagcaggtcttatgagaagggtgacatgctttcatttgtggttgttttttttttttttttttttgagtccaggattttggctgtcctggaactcactctgtagaccaggctggccttgaactcacagagatccaccgatctctgcctctcagggagacatgctttggaaaggactttgaatacacagcgttccatgtgcacacaagctgccctgtggtgcagttggagggaaccagcaatcaaggagaggcaggccactcagagcaggttctctgcctctttctaaagtcagtccaacctcattttcccttgagcagctgcccttgaacctgagactctgggttctgagaatagggaactacctaccttgccgcaggcaaaagaggaagaagtgactgtctccttttgagggtggggccagaattttgaaatagaggttatggttagaatcttcccacttctctttctattctgtggcggaccatcccctccagatctcagaggctcagcctccatgtagtacccccccccaccccatgccccatcactctgtttttaggaacctcttcacttccagtcgtcaaaaacaacaaacttctgctagaaagggccatctgtttgaaacagcctttctaaaatgtgaatggctgatagcctcacaagcttcccagacacaagcctagaaaacgacagcacgtttaaaagcatacggtaaactaaaggcctagtcatagatcttgaggcgttcaagtcccacctccgataagaactctggcagccaccttgtgcttcagctgttaatgaggaagttacacaatgaaaccaaaaaatttaaataacctgtctagaacacttcacatgcagacattagtaaatgctggctcagagtctttcctccacaaacctgcacagaagtctagccatgatttctggcttctctttgctgtagtaacacacaaagaggaaaaattaagcatgcaatgaaaggtattcgtggatataatacgcttatcatcacatactgttaaaatttggcaacatcttattagtggtttcagctggggaagttttagtcaggtgactgttgctttgataactacatttgagagttctctgaagatgacttgactgccttatcttggtgagataatagaccagcacccaaacctggctagctgtttacttacttaaagaggtttatatccaaaatacataaagaaaccacacaagccaatagcaatgggcaatagacattattcaaaggcatacacaaaaatgatcagcacacatgtggggaaaggctaacatcacgagtccctagagaattgcaagctaagaccacaaaagataacacctcactctaatatgaacgatgattatcgacaagaaaagatagtaccggctgtgaaggatgtggagaaaaaggaacccttgcatagttgataggaatgtaaattagtatggccgttgtggaaaacactatggagacccataaataacactgaaaatagaactattatattgacccaataatcctacccctgggtatatttccaaagaaaatgaaatcagtacatcaaagagacagccacacttccccgttatggcagcagcattgacaaagccaagacatggaagcagagtaagaacctgtcaactgataaggcaaatatggtatgtatgcacaatgcaatactacttaggtatttaaagatgaaattcagctgggtggtggtggctaggcccttaatcccagcactcgggaggcagaggcaggtggatctctgtgagttcaaggccagcctggtctacagagcgagttccaggacaacctccaaagcaatgcagagaaaccctgtctcaaaaaaaaaaaatgaaattctttcatttgtgacaacatggaactgaaaatcactgtgttatgtgaaaaacaaatgctttatgctcccattcacatggacaatctaaaaagtttgacttcaaggagctgacaatagactatgattgtcagaggttgttagtgtaggcagtagagagaggatggagattttggttaatagtctctaatttataattagattagagaaatgagctgtgctgttctgctgcagagcaatgtgaccatagattagatgataataaaacagttgttcacttcaaaagagatagaatgtttcgctggtaagaaatgagccaattggtggtggcacacgcctttaataccagcacttgggatgcagaagccagcagatctctgtgagtttgagaccagcctggtctacaaagcaagttccaggacagccatgtctacatagataacccttacttcaaaaaaccaagaggaaagaaaaagaaagagagaaaaaaagaaatgatgactgtttaaggggagagaattgcttcccctgatttgagcatcacacattgtattcatgtatcaaaatgaaacagagtactcaataactatgtgtacttttgatgtatctatgtgcctattagatatgcttggaataactgtttttgtcctgaattgtccccatgttactaccaaaagtgctatacttcagaaaaccctcaatcctgggcaaacagaacatctgttcatctagtaaccacattgatgcagctatgagtggacttaggtgcctgcatagaagacaaagttggtactttattaaccatttttgcatctatgtacatcacagacattggactgtggctttcttttgttgttgttgtgcccatgtctggttttggtattaggatggcattcattttagaatgagtttgaaagaattctttcccctttggttttcaagagtgatttgagaagaactgagagatgttcttaagatgtttagtagaccagcaattaagctatttgggacacacttttattattgattcattctcatgacttgacactgttttgttctgcttttctatttctttactaatcacagtaaagtgtccatctccggattctgtccatttcttctgagttggcaaatgtgtttgcacacggttgttcaaaatggtctctaataatcttttggattcttgtgttttgaactgtggtgttttctttttcctttctgcttttgtcttatttcttcataaaagcatctcatttcattgagcttttatttttttttgtttgtttgtttatgatagaggctcgctctgtgtcccggcttgaattcactgtgtaactcaggcacgtcttgaacttgcgtctactgtcatgcttcagccatgattataggcatgaacaccagctctggctactctggtctctattgcttttcaaaagttctaacaagttccaacagcacttagagctcatctaatatgccaatgtcatctaataaactaatgtcattggctgcatgtgatttaagaggcaccagaagactcttctgtcactcagatttcccaaatgctgctagcactatcctctgccagtctataggttccaccgctactgttcatccttatctagaatatgcctcaaacactgctcttctgtagccattaccaggattacacatcgattattcagccatcctcttcagaaagccttccttaccaagcccaagtctggaaaagaagaaggctttggagtttcctcccatctttagccatcctcccaacacacacacacacacacacacacacacacacacacacacacacacacacacaaacacacacacacacacacacacacacagagcttcaggccacaagtagcttcattctcactctccccaattccataacaaaccgctcttaaaacaagaggtcataagtgtgtttccattaaagtgtaaagtgagaattagttttaaatgtccctaaaatttaaagggttgctgtgtaaatagacatacacattagttcacgtttatgtttatctcatgcaaaaaatgtcatagcaacagaggggaatccagggccttcaggaaagtacaacagctaaacccctaacccctgtgatttttaagcaaaatatcccttcaccaactgccacctcccccaaaaaactctatttttaatgcaaaattatctcctttgaaaatgaaaaatctctaaacataaagcctagaagcatatattagttacgtattatgttctatatgtcatgtagctagcaaacatataacattaaaataactaaaaattaagttaatttaatagtatgacttatgcaattctaagggaaccacaaattcaattaaagagctttttttatgggatagtaatgattccaaaatccaaataaaagaggactacagctctagcgggtaatggtctcggctttcttgtggctgctgttactgacgcatggctgtagttattcagcttttatctctttctgtttcattttcccaggaataaaaactgtttccatctcattatttccactttccaaattaaatcacacactaagtgaatcatccctcattctttgcactcacaatgaaagcatccaacccgagtttccctccagacgtttatgtctcagaagctaacgcagcagttcagtcctggttccttctgtggcccctgtttatttcaacagcacacaggtccttttcttcagaaagcaccacaaaaactcaagggaatagtgactgctgtaaatctctcattactcattttcctgatactggtgggcaaacctactatcaatattcagaagaaatgaaattctgaggccatgaaaagaatcactcaagggtcagggttagggtcctgattttggactgtctgggtgaagggttagggtcctgctcttggagtgcttgggtgcaggacaactgtacatagctgaatgatagagaagatcacaactacatagagtgtgtaggtgacttacggagctccttccaagtttagatcctattaattattaattaaaattactttggggcaatttcttggtacttgacttggcgagcttctcctctgctgggaaaattctacattgtgaatcatgtgtacaattcctaagtctggactacctgcaactgctgccaacccaacccagaaattaaacagaaaattgacaaacactgactgagtaattttaaatacaagctgctagactatggaagaattttcaatagttgtcaatgtaatatttaaaaactgagatctgaaactaccatggaagtttgaaaaaaaaaaacacaaaggataagaatcaaaagaggtcagcagttagtattgtttagtgttacaggtgaatagatacgttttaggtttgcttgcttttagtttaatggaatggcttttaagtttaatggtccaatgggggaagtccttctgtgtatatgtttgtcttattggttgataaataaagcactgtttgctaatagggaagcaagataggtagggctaggagttgaggaagattatgggaaatgtagtaaggaagagagttgccatgtgatcccgtgaagagaggacacctaccgctggtgtcctcaataagaaaagtctttataaaatatatagattaatggttatggttgatacttaagactgagctaccaaataagaaatcttagtcattggccagcagcattgtaaataatattagactctgtgtgttatttgggggccctaacatgacagcaggacttgagtggctggcggaaagagttatcattataatggtctgaatggtttatttgggtttggttacctgggagacccagaagcatcatggaggcagaaggggagatgtatgttctcaatttccccacctgccaaggtgtcatgtggccatcatggtcccttgataaatggctataaggcctgtgatgttgccctactcaaatgcccttcgggtctagatgccttgtcttgggtcactgtgtcaccatttgataaagtggccaaaagtaaaacatacttaaggaaaaccccagcagcttcagcagtggatgtgcttgattgggtctgggattaagcatcagataatcagacaaatgcaggaaaacatgtagtgcctcaaatatagaccggttccttacttcatagatcttcaaaactcatctgcagattagctttctgtttgaaaaggaaaatgaaggagctggaaagatgactcagaagctaagaatacttgttgttcttgcagaagactgatgtttagttcccagcacccacatggttgctcataattatctgtaattccagctgcaagggatcctcttctagactctacaggcagcaggtgtgcatgtgaaacacacacaaaaatgtaggcaaatattcatacacataaaatacaaataaacatctttttaaaaaggaagaaggaagtgggttttggtggtgtggggaagttggagcattcatttgtttattgattattggaatatgaaattgtagcgccactgtggaaaacagtttgatgggtcctcaacatagggttggacatttagtttaggagtggggagcttgcctagcatggctgcaaggtccagggttcaatgtacaaggctgtggggtaggaggagttaaatacagaattgccacataacctagaagttccagctttgtgtataggccacaaaggatgggaaacagagcatcaaagaaatacttatagttagttgtcataagcaacataaaatacaatagccaaaagactggtttatcttcaatttaaccttgatcagtaataagaaaataaaggatgggatgttgataaatgtacaaccatatagcccaaacaatatcatgttaagtaaaaccaaccaatcacaagaggtcacacatgctatgattccatgtataggaaacatccacaatgagatcaagacagaaaacttgggttctatgggttgaaatttggcaggaatggggggtaaatgcctactggatagaaatttatgttagggattgtggtggtttgaatatggcccccataggtaaatagggaatggcactagtaggaggtgtggccttttgggagaaggtgtggccttgttgaagaaagtgtgtcactgggggtggactctggggtttcaggctcactctctcctcctctgtctgccaacccaggtgtaaaactctcagctcattctgttctgcagcaccacatctgtctgcacacagccatgcttcctgccatgatgataatggactaaacccctaggctgtaaaccagtcccaattaagtgttttcctttataagagttgccatggtcatggtgtctcttcacagcaatagaaaccctaagacagggatggtgggaaagcttttagtttctatcacagcagtgatagaaacagtgagaatggccttctcacaatggctaacgcgctaatttatgttatacgtgttaaaatatatttatgctacataggttatttaaaagacatgagtgttggagtacagtagtgtaaatcccaacattcagaggctaacgcagcagaatcacaagttcaatgccagctgctatggttaatcttgttataaacttgattacatttggaaccaactaaaacctgagctgttgggcctattttcttagattatttgtggtcagaagacccaccctaaatctgggccacaccttctggtggcagcccacagaaaaggacatgaaagaaggaagcttgcctttctgcccgcttgccccccccccactggatgttcccctctcgtgttgccacaggtgttaaagtcagcttcttcaggattccaatgtagagggatgatcagcagctctccaggaatcctataggactctaggcctggattgggacatccagcttcctctcagggtgaacagacatttgttgaggtctctataggaagcctgttacacaacagtgtgtgtgtgtgtgtgtgtgtgtgtgtgtgtgtgtgtgtgtgtgtgtgtgtgtttgaggaggtcaaccttagtgacattcctcgagacacctattaacttggttttcagggacaggcctagagatcactgattaaaattaactggatggccagtgagccccagggatccacctgcccccacctctctagtgctgggataataagtgcctgccactacacctatttttttaatgtgggttctgagagattttactcaaaaggcaagtactttaccagctgaactatctcccaaatcccctttgtaggaggagattttctgttctgaccacctgctcccaaataatcaccaagagggttaatattaatcataaatgctcagctaatagctcaggcttattactaactagctcttacaacttaacccatttctactaacctatgtgctgccccaaggctcatggttttacctctatcccattttgtgtgtctgacttgttctccatctggctagctatagcatgatgtagcacaagtaataaaaacccagagacagatattggggttcaagttgaagatcagagaaaaaaaaagcagccaatccactagagagttcttactacaaaggctaagaccaaagaggggtgatcctttcctcctagtgactgcagactgcactgctctccatcaaacctgagactgccttgagactgcactgagcccctgcattatattcctgtctagtaccaggattaaaggcatgtcattccaagtgctgggatcaaaggtgtgagctctgtttctcttttagattgattcactcctgtgtagcccagggtggccttgaactcacagagatccatctgcctctgtctcctgagtgctatgattaaaggtgtggctaccactgtctgtcctctatggctaagtagtggattaggtgtgtggctagctaatagtttagtgtatgtgtggctaactagtagcttagctccacactctgatcttcagacaagctttatttgttagattacaaacaaaattatcactagagctggtgaatcccttgactccgcccttcctcatgccatcatcattagtttggctttttcacctaactttttatcctatttagttattggccagtcggcttgtttattaaaccaatcgtaatgacgtatattcacacagtgtacaggaagattattctacagcatcccttactcttattcttgaaacaaggtctctcactggcctgagacttcccacgtaggctaggctgactggccagtgaaccccagggacccaccagtttccatcactcttggtgctgggactacaaacacacactaccatgcttggcttttaaaacgtgggttctgggggatgggactcagattgtcatgcttgtaaagcaatcactttgcaaactaactgttaccccaccccaaaactattaaaatattccttcaagtctttcccccaaaggctcagtgaggggttttgtcatgacattcccccacaaaatataatgtattttgatcatagtcagcccctatattgttctctttttttatcccatctcctctgcttcattccccttacgtattacatacaagagaaaaggtgtcatatttgtctttctcagactggcttgtttcacttaacatggtgatttccaatttcatcggttttcctattaataatttcattgttttgaatagctgaatccagctccacatgtcacagacatatttcacttgcttaggctaggagcacattgaatgactgagagcaaagctgtcttctggacctaattcccctcaaaacaataaagcaaaaacagtctaagtactgctgaggtggctaggggttatgagtgtggattgctgaggatcagaggttggttctcagaacccacaacagctgactcacaactgcctgtgacttctgctccaggggatccaaatttttaaaaaggtcaaaaaggaatcgattcttcagaaaccttagagttgtatctcaaaggcctcccttcctctagctgcaattcctctttttaagggtgggtgcggtgcacacttgtcacgtacaagaatcaggccactctcagcagagcagcacgtaggagactaatgaccaagagagaagcaaagatgattagtgagtaaaaaagccaaatcaatcaaaccatgctgacaactcatgaaagacggccaggcttaagggaggaggcactgtcccgagagagcgagcactgctcataactcagaaggaaaagccttcataaccctgtaacaaagtttgtcccaggacatttgattctcggcgtaaaacttacagaagcattagtaaagcattcagcatcttagaagtgctagacaaaccccagaggtggtgaaggtcactcacatttccacgtaggacccgtagaacagccaaccttggcagtcagaaggacacggaggccaatccctaactcagcaccactaacttgaggcccacaggaaagggctcagggaagatgacagggtgcttcggagtggacgaagaaaagcaaaggtgtagactgctcccgggacatgaacaccaagtgtaagctcaaagtgcacgaggatagatatctgtcctctttttggctctgtgtgggcacatgaccacctttcgaacagggacgcatgtccactcaccactgcaaatggtcccttctttggtaggagattcagattactggagtctttgaagtcgatgagtaaaccttcccaggaaatttacagaacatctctgagtaaatatctgatctggcacaggctcagttacgcatctgtggggtagacagggagggacatgtatgcaatttcttagcctccagggcaagttacaggtatgctgtctcttacatttggcatcagggaagcagaaggatgacactgctaagtgtgcttgcattcatcttaaggagcagttaactaaacagaataagtcctttaagccaaatctatagaaagacccgtcagacatttgctttgccagagaaagtaacctttgccatcttccctttggagaatatgggaccatcatttccaagatggaaaagggattcccccctcccccaaaaaaaaacccactgatttctaaacagaccaggggtagggagcagggttcacgagtatcttcagagtagacccaaactcatattttaaaaggaaggcttcaagccaggcgttggtggctcacacctttaatcccagcattcgggaggcagaaacaagcagatctctgtgagttcgaggccagcctggtctccagagagagtgccaggataggctccaaaagctacacagagaaaccctgtctcaaaaaaccaaaaaaaaaaaagcctcatatttacagtgatgaatttttcccatctaaaagtctgcaactcccaccctggaacccctggagatgtgctgtattgaggtcctggtgagcatcaatgtggtggagaacaaagtcgaatttcctgtagccagtgtaaaccatgaagtttggtatgtcattagcagagagaaaaagtccatgacaacgcctggaagagctggggaaacagaggttcacctcagaagtcaattctgaagaatagtccttgcagatggccttatgcaggcacagggcagtttgttagaggatttttttttttttttgcttcgaagaattttaaattttttagtttatgttatgggtattttgtctgcacatacatctgtgcactctgtcatacagtgcccaaggaggccagaagtgggtgtcacatgtccctggaactggagttacagagggttgtaagttgtaagcacacatgggtgctgggaattgaacctggatcctctgcaagagcagttggtgctcttatccactgagccatctcccaccagtcctgaggaaacattgtcagtcacagttgttttatgtgtgccaaaactgaaatgaaatgcaattatttaattatgtggtgaccatcaataaaagtagaaagtataataattttaaattaatttagtaaaaaaaggctatgtccagaactaatttgacttgaatgcaacaagttaagagtcctccagtagtttgacttgactgacctacagataaaaacctaaaattaaggggcaagtacacagacagtgtgttcttttatatttcctcaatttgtgtctctcaaagaagatttttaacaggatctataagggcttaggttattcttgtgagcaatgtatgataggagttaacaaatggcatcccacttcctagttacaggctgctcacaaggtaatttgttgttgttgcttttttaaatggttgtaaaagtcagaagggctggggaatacatttctgtggtagagagtttgcctatcgtgtgcaaggcatctaggttctattttaagcaccacaataagtgtagaggtaagtggaagggggcatactttgcaaaaatgtgaaaattatgtgaaattgaaatttcaatgtttacgattaaagttttattggcacacagctataccattcatttgcttgtctataaatacttccatactacaatgacagagtgacagtcacaatagaaactattactttcagagtctaaaatttagacccagtggcccattacagaatatactcctggttgacaaaaatcctgttactcccttgaaatcacagacatgaacaacagagttggagatacagtgtactttggaagggttcattaaattttacttattattgttattaattagtgcgtgtgtgtgcatatgtgatgtgtcaagggcaggggagataagcaagcctcatcgtgcatctggcaatcagaggacaactttgtgaggtaagttctctccatctccctttacacgggacccttctggtcacaaggcaagcacctttacccactgagccatctcactggcttcattcctatctttgcagatgaaaacagacttctaggtagagatagtacaaagccacagaattgctactcgatattattagacaaaaacgagagaaattttaaaactactaaatacctaaccaaacctggcaaagatcaatccatccttaacttcaggaattgattagcaatggaggggacactaggagcagcagtgctggggaagggacactgggagcagcagtgctgaggaggggacactggaagtagcaatgctgaggaaagctgagttagcagagcagtgacttagctactgaaatctgtgcacgaaaggagatgggtcagcagggctggggagctcaaaacagtctgcagtgacaggaaagactctcacttttcatgaccttgtgctgagtcggagaactgggtgagagaaggtagacctgacatatccattgcctgaggggagtgaactcaaagctcactcttctgaggggctagaaaaatctcagcaaacaccacagagtccagctacagcctgcactaggctctacctagttctctccttcgggccatgttgatttgcagaaaagtgggtaggaagcagcatattagcatcaacagaggtcacatgagaacaaatggactactcctagggaaggtggaagcaaatggccagttggatgatttgagtgacagaaaatggagcagggtgtgtgtgtgtgtgtgtgtgtgtgtgtgtgtgtgtgtgtgtgtgtgtgtgtgtgtgtgtgtaaggatgctaagagggataaggatacagagggcatgaaaaaagcaccctttataaagataactggcctcaggacctcaaggggctcttgctgcaagataagaaagcattactttttaaagataggaattgcttccagggaagaaagtgaaagatgctgggaagtctggaaacctcaggaatgttgatcatattgagcacttgaaggagaaagtcagagctgtttctaagaagctgttctctaggaggcatttgaaatcttaccgagaaatgcttttagaaacagtcttacgggctcagtagtgtaacttggcagaattcctgcccagagtgcatgaaaacctggattccatgcccagaaggacataaaattagtcgtcgtcgtagcacacatctgaaatccttggtgatggagacaggagaatcagaagttcaagttccttcagctacatagtaagctggggaccagtctggaccaagtgaggccctatcttaaaaaaaaaaaaaaaaaaaaaacaagacagccaggcggtggtggcacacgactttaatcccagcactcgggaggcagaggcagaggcaggtggatctctgtgagttagagaccagcctggtctagaactagttccacgacagcctccaaagccacagagaaaccctgactcaaaaaacaaaaacaaaacaaaacaaaacccaaacaaacaaacaaacaaacaaaaaaacaagacagaagctggagagattgctcaatggttaagggtgctcactgcttttctagaggactcaagttcccagcacctacacagggaggctcacaactgcctgtaattccagctctgacggatctaaggctctcttctggcctctgcaggcacatgcgcacacacgtgcacacacacacacacacacacacacacacacacacacacacacacatacacacatgcacacaaataaacaaatacatgaggttaaaagtaaaaagaccatcagctggagatggctctcagtcatagagtaatttgcttaacatgaggtcctggattcaattctttgctacaacaacaaaaccaaaataccacaaaaaaaaaattggagattaaaagtcataagatgtttcctttggggttttatttgtttgttttctcttacagtttttttttcttttgaagtgtgttgtgcagtcagtcacccatgaaacatgtgtcttcttttcttcaagagaacctggtccctcaaacaaaagcatgaaggtttgagtgggcttaacttttctcaaacttagttgaaatttaaaatcatctaggaagatttaaagctcccaacagcttttatcctaaaacaaaacccttatcagactctcccaggaagcgaaacattagtataaaattcccaacacacaacactgaaattaaaaacaaacaaacaaaaaaaacctttctttacacattctaaggtgagcatcactggactgatgtctaatagcatctaattcccaactcctgcttccattgtgtgcttcttacttattccttttaaagaggtgatatctcctcattgcccaggcaggctttaaactcctccgactcaagtgattctcacaccaaagacaggactgtgtcagctccacactacagtgcctggccacaacttcaaatttctattaatttccattctcttaagcgtaagtcgtggttcacactatcggagttgccaaattcctgttgtggggtggggatccttgtacattgtaaggcagtttctcttgtctcaaatctttaggggccagtggccatctccttcaagccttctggttatcagataacgaaagaatctccagatattgccaaatgtctagtaggagacacccccagctcactaggaatcctgttttccacaagccagtgacccaaacacagttcagtggactgtcaaagactcttcagaatcagagcagtgcttgtgtgttccatccagagcccacatacctccatcctacccttttagtaaataaattaaggttcagttctcaactgccagcagagggcacctctaaactccaacagttgtactttcttctgaacccctggggtgatgataagataaaggctctgctagctgcttggccccaaagccttgtgtgttagagaatcggagtgtgggccaaagacaagcctgtgcctaagggaggatctgaggaagcagaagataagagatctggggaattggctggcccagtgacaaagatgtgagccagtgaactagaaattagttctagaaactgaaaaggatcctagctactgggagaacttaggtcacttctactttcctggaaaggcctgcatggagtgtgcagagacatttaaaattcttctttctaactaaccaaattaagcattaacaggaacatcctaaacaagaattagccataaatacctgtaatcctaggaggccaaggcaggaggactggcagatcaaggagaccctgagctatatagggagacaatggctcagaaaacaaacgaaaccaaccaaccaaacaacagggacttaggatgtacttattataacacacacacacacacacacacacacacacacaaataaataaatataaaaaaaataaaactctcatttccatttatccctggcactgcccaaaacgaacaacagtctctgaaaagacctttaaaccttagatgttgttcaggagctcacaatcccacactgcagctgccaccctatctcaaattctaactgccacagtgtatttcaggtcatcatatttgtatctacaactttgtaatggcatcttttgaacatacactaagtttggaaaaatccaaaatttttactgagtactatggtcttggaagtatatctatttgctactttcaaaacatattcaattcagtataaatgtccctaaaaagacaataaaatctgagggtaggtcatgtagatcaacatccacatttacagatatagaaagtgaagatgcagagagagaaaatgcctgacctaagcagagttgactctgggctgggatcacgaaacttctacctcctctccagagaaaacacaggcagattggccctacagtcctttttaaggcaatcttaattccacacactttttatgctaatttattaacgtcacttgctttcatagatgacaaaccttggtagattacaaactttgaacactttgaggtaaaattggcctgtgtttgaacgttgattctacctcttaaggtgaagaagacaatggtgacctttgacttaacattattttccacagtcaagactaagagtgattgaccatacaaggatcaatgttttgaaaagtgtcgggttttctttagtcactatttatttaataagaatggtataaaacacaatcattattagttatgtctacaagacttaaaaaaaagatactgaagacataaagcaccttaaaccaagacctggggcagactaaaagacaaatggattatattatagagtttgagagggacaccatgtaacaatttatttaaaagattatgaaatactctgtgaatccactctatgagaactgagctgagataattaaataacaaccagactggattcattcagaaaaagaactgaagtaccctgggcagttttcatcaagatgcccaagtgttttataatgggtggagttgaccaaatctcatgaattgtgcagaatccagtcaagatgaatagatctaagatcacaaacaaccctaatctaactctgatggcatttagggaaattcacaccgagtgtacttgcacagaaactgaaccaagtttctccttgaaactcattctcaggaacgtcatctgtttggctgttgatatgtgtatgattgcttcttataaacttacaaactttccaaacccaaaactcagatatacgcagcaggaagttaacaataaggtccagatgcttgtaaagaagctgctatcaggaaccagcaacactaacagcaaatgggatttgtaacatagtggatttttaattgctgtgaagagacaccacgactcttacaaagaaaacatttaattgtggtggctcacttatagttgcagaggctcagtccattatcatcatgacaggaagcatggcggcatcaggcagatgtagtgctggggttgagagtactacaccttgactagatggcaacaggaagtcacactgaggcaagcttgagcaaatgagacctcaaagaccacccctacagtgacacaccttgtccaacaaggctacacctcctaatagtgccactcactttcggggtcattttctttcaagccactacaacgatgcaaaggctttagacctaacgggttatgacatatgggtcatggccatccctccctgcatctggacttgcttcaatcctaacatcctgacccaataggccaggcagcaatgctaagagccacagcatatttaaaaagaaaatgatctgatacatagtaaatcctcatccatctacttggtaaacactatttgtaccactaacaccagcacttacagaactttagggtcatccataggcactcacagagagagacacagtctctggttaggatagaagagtagtactatgccctttttagttcttacactatgaacacatccttttcagtctgattagtgtttttgttgttgttgctgtttggtttttcgagacagggtttctctgtgtagctttggagcctatcctggcactcactctgtagaccaggctggcctcgaactcacagagatcttcctgcctctgcctcccgagtctttctctactgtagtgttttgaatgataactgccccctgtagtgttttgaaagataactgccccccataggttcatagagagtggctgttgtggagaattatttcaaggtgtgttacatttgtttatgctgtgaaacattatgttttaatgatgcaaagatgtgttgagttctttcatgttgcattcctttaactctgtgacaatgttactttacctgtctaaaacacctgacagtctattaaagagctcaacagccaatagctaggcaggaaaaagaataggcagggctggcaggcagagagaataaacaggaggagaaacctgagagggagaagagcatggaagaacaaggagaggaggaagctaggggccagccactcactacacaacctggcatggaatcaaagtgaaagatacatagaagtaataaaaggacaaaagcccagaggcaaaaggtagatgggataatttaagtcaagaaaagctggctaaaaataaggccagacatttataagtgagaattaaatctctgtgtgatgtatttaggagctgtgtggtggggcccccaaaagagcaaagagccaaaagagtttaaaaaagaaagtggcactattaggagtagtcatgcatggccttgttggaggaagtgtgtccctggggggtgggttttgaggtttcagaagctcaggccaggcccagttggctcactctctcttcctgctgcctactgatccagtcgtgatgataatgaactgaatgtctcaacctgtaagccagccccagttaaatctttccttctaagagttgccgtggccatggtgtctcttcacagcaatagaaaccttaactaagacatctacttctgctatttaaaaaagtctccacaccaaaccgaaaggctatatgctattcacaagaaggctgagatgacccatgcattatgggtgctgttggccagtgggttgatggtcatgaatcaacagaatgtagtaaataagacgtctttagacttaagctaagaatatgtattggtcatctaacaaaaacttaaccaagagactcacagggacttaacactgtttctcctctaggggcaatgtatttgttaattcagtgtccttaacagcattatgaactaccacacattatgagagctaatcacaactgaattggatttgtcacccacacagtaactcaggttggttccaatacccaagagctgacatttccctctcttcatattctcacacatattttgaatcaatactttctatgcccatttcctctcagtcagctatatctctcttttgtacttctcattgaaatggaagagttaagagacacaaatggttagacttttttttttaggcttattcttctgaacatcattttatttcttagtaaaaaattaaaccaaaaccatatctattctttttcttcgtattttcctcttggatttctcctttgtcactagagatgtgaggggttgtgtgttgtgttgagtaagtgaagataatatccaagaaaatatccccaattcaatttcccctatagaaaagagtgtaaaattgtaaaagcctcacctggcacaattcacaggaatgaatgtttaaagggaatcagaaatctgactgacattttcaagcaacagaaaaaatgtcatttttttccaaatcaaataagaaaaggcaccataaccataaaatataaaaccaaagagaacaaatatgtttaaaaaaaaaaacacagggctcggtatataagccattgttaaaatccagctcttaagattgttaggcaggtcacctcggttctttgacaataggaatggaagtaaagcaaacataaggtaattctgtcctagaaatgaaaaaactgagcggtcagccacgaggttaattatttaatagtttgcctattagctgtatataattcttgattaggaaagtgataacgtaatcacacagagacacatacacaaatctgcccctttgatccttaaacccatcagaaagcttgcagccatgttgttttagagaggaaggagtcacacaaaaactttaaaagatacttatcacccactcacataaaatatttaaagtgcaatggaaagcacgtcactatcttttcgtaaagacatgatgaatttatcacacattagtttacagctagattttctagatttgggaaataactgcttagcttcaaatcctaactctgcctctcacaccaccttgggaagataataaacaaacaaataaaaggctaccacttagcaagccatgagtcaatcagctaacataaggctgagtgtgggaagtttgcaagaaatattttagcatctccaaaaactagctatgagaacaaggagttatatttgccattcagataaatacaacaaaggagtatgccttaagacagagataaaccagttaaggtagcccagggaagagacttggacagtgacatctgggctaatcagtcccaggtcactctagaaggcggatagtgatggaaaatgggggaaagtgatgcaacaggggggtgacatgaacaacaaattgcaagatggggcagaaataaagggtgaccatgagatcattgcttgggaatcctgaatcaaatagcgagtaggaggggctagattcacagtatccttgaaagaaaatagaagctgtgacatctcaccattcactgctgtggttccaatgtgctccctggaggccatgtgttataaacttaatccccagagcaacagtgtagggaagcagatcttctaagcggtgataaagccaggaggttctgcctttgtgatcagattaatattcctatcacaaaagtaagtttgttctctttttcattccctccatgcctgcatcgatttttctacctaccctaccctctcctctctccatgatgtcctcccccacagcagaaagccttcactatgttcatccctccatcttagacaagtcagtctccagaaccatgaacaacacatttctgttcatggtaaactacccagataaagcagcacaaagtgacactatgaggtgatatatcatttatgacttaaaagagattgtctgaagtatcagaaagcaaagccagccacaccagttagctgtagaagtaggcagtggtggctcaacctttaatgctaggactcaggagacaggcagatggatctctctgagttcaagaccagcctggcctacacaagagtgaagagtaacagagctcatgcttttaataccagcactagggaggtggagataggagttgacatagctgtatggagaaaggactataaggaagaggagacagaaattcagagcttttgcccctggagatttgtggagatagcattgtctctctgaggattcgtggagacggaacagccctttcagcctgaggtaaagagctagtggctggctgctttgcttctctgatcttcagcttgaagtttgaaccccaatatatgcctctgggtttttaattatcgagttattaaactagtcacagaggaaggtgtcaaactacaggagatctggggctctaaccctttttttcacattggagctttttgtgtcatcgagattgacataatttaggctagaaaacatctaagtggggatgagaaagaaatcttcacagtctgataagaaaacgtcatcaacctgttccataaaaagaggtaaatgatttgacttatccaactagagggcctttggattgtgtagagcagcagttctcaacctgtgggttgcaaccactttgggggttgaacagccgtttcacagggatcacctaagaccattggaaataatcaggtatttacagttcatagcaactgcaaaattacagttacaaagtagcaacaaaaccaactttatggttgggggtcatcacaacaagaggaagaatgagaaccactggtatagagaatacttctatacataacaaaaattttctggttttttttccagtttattatgtactgctttatagctgggctgtagcccatggcacatacaactatgtgaattcaacaagtcctgaagtctcttctctgttctaaagagtttgtcttcttgtgctttgtgccctagcaatgtctctttttaaataagtctctaagtgctctagttttctatacttaccttcttgccaggcaatgataggagttcataggccagcactgtcgaaccagcctgcctccatcttgggcttgaaagccatcttataataaaaacaaactaggcttattcctgtataggattcaacctctgtttctgaaggaatgtcctatgtcccacatgtaaccttagctacaaatggttctgtattgcctgttccaggaaatggcaaccttgcctttgtttcaaaaagttgttatgagcatcttgcaaccctgcctttgtttcaaaaggttgtcatgaccacctgttgctatgactactttgttatgaccaccttattttctgcttctataaccccacctatttgtccactaaatctcttatttggaaaccccctacccttgagctataaaaacctcatatccaatgctgatcccttgaaattagccttaaggggaagcagctcatgaatatgaatttttttaaaaaagcttgctttaattaattggagttagtaatatcagtctgtagattaaacaacaacatctatggagaactttaagtcacataagtattccaggaagaggatataggaaaaccatgatatttagatgttatgctatattcactattgttgaataaatatttgtttaagttagaaagctgtagctttctttatttcaacataaacattgaagatattcagaaaaaaaggaggtcattttcaataaatgaaaaatggctgcttgtatataagactgtgaacatgacaaattggatgtacacatgatctcaactgactccaatgatgggggatgtccttctgtatatatgtttctcttattggttgatgattaaaacaatgattagtcagtagccaggcagaaagtataggcggggctaccagacaaggagaattctggggagaggaggcagagagaggtcaccagagagacaccatatagcagctgaaggagtaacatgctggagcactctccagtaagataagaccacctggaaatacttagattaatagacatgggttaataattaagagagagcaggccaataagaagcctgagtcatcagccaaacagtttataattaatgtaagtctttgtgtgtttatctgggacaaagctgtggtactaggtagaacagaaactccatttacagtccagagtgagaacaaatagatctctgactcttgtgcctgctcttggaactcttttcctcctgttgggttgctgtgtccaactttgatacgaaagtttttgcctcaacttactattttattttgttatgtttgcttattatctcttagaagcctgctcttttctaaagagagatgcacagggagtagctctggaggggatggggggaacagaactcaatgaaaaaaaaagaaattacgaagacatgattgctcttcataatttttgtctgatgaaggagaagttttattgtagatatgaggaagaaaacctgcagagactgagacatccaggagagtctagagtgaacacaaccctgaactgggccatgtgaggagaggagggagggaaaaggagagagacaggagactaagaaccaagaactccaaagagaaaaggggtaaaagggccagtgtagcaaaaaatggctgggttatatagggaagaactagtagggaaaggacaacacaccctggttcttgggatggagaagattagaggagggagagggtcataaaaatcataccctgtaaaaggtagggactgaaggatgctgggacaacctggctgccaggtccactttgataaataggcatgttaaacattgagtagacacctcatttagccctatgactgggtttgagacctaacagaactgagaggaatagagggagggaaagctattatcaggatatattgtttgagaaaagaatctatttttaataaaagtagaaaaaaagaaaaggaaacaattggaagatataaggcatattgatagtaacttactaagcctgaaaggctaaagaaattacaagacatgaacacacacacaggcacgcacgcacacacgcatgcacgcacgcacgcacgcgcgcgcgcgcgcatgcgagacagaggcagagagagagagagagagagagagagagagagagagagagagagagagagaaattaatttcctagttttccccaaagaacactagaatgcctcaaaactagaataagcatcagatgtgtggctcccccataccttagacagaaagctgagtaatccacagaaaccagccctgagcaatcttgtcaatcaccccagtcctgaagatcttctttccacagagcatcctgttaatgggccattttacttcctgtgtgtaagacagtttcatcagatgtcctgttatctacagataaaagtcctaacgcacaagagggagtagttatttaattctttccctgccagtgattgtggcttttatctaaagttagacttgggatagaatttctgaaggtagatatcaaagaatgagacgttgtcccagcaacggagtggctagcacctcttcagggagagcatggctaccacctcttcagggagagtagccttcccatcagatgttcttaagccacaacctcaccccattggcatgctgggaaaatgtatgcagatcacatatccgataagaaaccagtcaatatccagagcttataaaggacttttacagttcagtgatggctgaatcaaacaatcaaacaaactgcacagtttaaagctgggcaaagaaattaaattgatatttctctaaaaaaggggccactgagaacagggtagtcattagagaaatgcaaattaaaactacaatgaaatgccactttacacgcacagaagtagcaatgatggcatataaacataaatatgtatagaaaataagtattgtgaagatgtgcagaaaccagcattgaggtgtgttgttgttgtgactataaaatgtaggatcactggaaaactgcaaggcagttcctaaaagagttaaacacagaattacttgtgagctaaaaatgtaacattgcgtctttatccaaaagaaatgacagctggaacttaaacagacatccacacataaatgtttatagtgatttttttgtaagagccaaaaagtgaaatccacccaaaagtccatcaacagatgaacaaataaataaaatgtgtgaatgtacaatgggatatcattcagtcattgattaattactgcagggtctcactgtatagcttgcaggccttgaactctcaattctcctgcctcattttcacaagtgctaggatcacaggtgtgtaccatccagacagattcagcttgtaaaaggaatgaaggttttattcatgcaacaatatggattaacaacgagaatattacaatttgtgaactaaatcagacacaaaggacaaataatatactgttgaatgactagcaggcactcaatgaacagacaaatgtatagacacagaggatgccagaggatggggtattataattcaatgggtacaatgtctgagatgggtatggtgataatcacacagcatagtgagtctacatattgtcagttcattgtatacttaaaacggcaacttttatcacgttaaaacaagcagacaagcaagcaataaaagattggagcaaaagtcttgcagcctttgtcagggcaaaagggcttcctgatggattaggagaaaacactgtagttaccaatgtggataccatagagaaaatgtaaattataattaacagttcccaacattggttgatatcaaagaaccaaatggaataaaatgcaaataagcacttggaaatcgaacatgccattgccacaatgaaaatctcactattggcctgaagagctaagtgaagatactgaatagtgagccaatgaagctgcaggtcaagcagaaggatattcccaggattcaatgcaaaaaagacaagatgtagaggtttaaggggaaagattcaagacgtgacagaaatatctacaagctctgctgttggtataatagaggtagactagagaacagggagatgttgtcacggaattacaggggcatttttctgagtggagactagagtcttcaaattaaagaagggcacacagagtaccactcgtgaagaaaaatacagttagacccatataggaaagagttcagagttctaagaaaaagagaaatctgaaagtctccagcaaggggctgggaaatgaacgagaatgaagttaacaccagagatccatcttagatgcatgacagaggacaatgaaacattttgacagctgagaaaaataattttgagcctataattctatatttagaaagccatcattcaagcctgtgagcaaaattaaactatgtttagacaattagggccttgaaaagtttacaatatgaactttgactaaaataattacctgcaggcaaaaagaaaaagaatgaaaaaaaataattcataaatgttctagttacttctaagtcaatgttgataacatacttgaaaagcctaatgtgggtgcctcttgagaaaaaggaggacttagggtttaatttagcctctgcgtccccacaaagtagagccctcagccttaggccatcagacattgacctcaggggaagtaacctcaagttctttgaatagttttcacccaatatctagcttacctgaggaagacatggagcccaagcatctattgtgaagagacactgtgaccaaggtaaccataaaagaaagcatctaactggggctagcttacagttttagagggttagtccattacagtcatggcaggaagcagacaggcttggtgctaaagtgatggctgagagctttacattcagatccacagacagcaggcagagagagagagagagagagagagagagagagagagagagagagagagagagagagactgggcctgatgtgagcttttgaaaccttaaagctcacccctgtgacatacctcttccaataaggccacacctcctatcctttccaattagttaatcaactagggactaagcatacaaatacatgagcccatgcttgtcattttcattcaaacctcgacacttctctttaagtttgcacaatcccaaagatggaaataatagggaatgagtagaaaaatgaagagaatttgaggcaaaggtatttaaatgtgaaaaaagaggctgctttccatttgcaaacttactactaatgtgctaaacatttctaaatgtttcctgcagttgaatatggaattatttatggaacttaaatatgtaaatatttaaatgataaacatttcagtttacatctaaattgaaaactaagcaaaacacgaggaaaaaaatcattatagcaacaaaggggtatttgtgtgtattgtatacatgctcgtatgtgtgtgcatacacaccatacacacacacacacacacacacacacacacacacacacacacacacacacacaccttcctcagcaccagggttacagagatggaggccaagaatccaagtctgagaccagcctgaactatttttttttaagtctaagtattttccattgcatttgattattctgtttcttttttcagtaaccacttgccctggctgttattctttgtgtttaaatgtgtaatttagtggttttcactatattcatggttatgcaaccaccaccattttagaacatttccatcaccacccccaaaataaattctgcaccacaaaaccatcacttggtagctttgatgttgattcatgagcatgctgcttggtgacacagaactataaatgtgtgactttctgtgtctgtcacttcttctgcatttttattaatgagacaatttcattaaaaaaataaactttaatcaccaattgtttggtttccctaaattcaatttaaatagaaaaggaacgctacatgatttttctttccttctttcttttccttccttccttccttctttccttcctttctttctttctttctttctttctttctttctttctgtgtctttctttattccccctctccctcccctccctcctttcttgctcaattcttttcatttgagacagtctctcgaatagaccaaattagcctccaattccctacatggctgaggttggccttgaattccccgatcttctcatctctacggccaacactggtgttacaggtgagtaccaccatgcctaaaccttctttactcattagagatgaattggaactggtgatggtgcaccaggtgaagatgctttccaccaagcctggtgacctgagttcaattctggcatccacatggtagaaaataacagactcctgcaagttatcctctataatctccacatgtgagccatagcgtgcacgcgcgcgcgcacgcgcacgcacacacacacacacacacacacacacaggatatgtattctgtatgcacatatgcatgcatgcatgtactgctgccttagctgtcatcagtggtgactagtgaagctggttatgttttccatgtgtgctatgagtcaacacattacaattaatgatcccttttctgctgtccacactttgctcattagagcttgatggctttcatgtttccaggtatgatacaatgttccaggttcaccccaagcacatccaacctggaaactgggctctactatttccctaaggaacccaggttcctttagttggaaatagaaacaatgatgtgaacccgagggtatcatttctggtaagtgagcaaagaagacacaatgagaaagtacacactgattgtggaggggaggcaaaactatagtgatagttccatcttaaaggctttttatattaaacaacgatttcactttattataattagaccataaataaaaatatcacacagctagttgaaggcagccactcaaacacttgccccgttccaaactggggctaattgtgaacacacagttaggatagccattttgaagccatggagcttagtttagggttttactctttcattatcaagtacattttttttcttgggtttttgagacaggatttctctgtgtaatatagctttggctgtcctggaactcactttgtagaccaggctggccttgaactcacagcgatccacctcctcctgcctcccaagtgctgggattaaaggtgtgcatcacctctgcccagatcattatcaactacatctttatacactagccaatacaaaagaaaggaaaaactacagcagaattaaaactagaaaaaacaattagctttatacatccttgtgactctgccatatgttcttcctcaccacctattattaccctttctgagttcctttctaaatgttacacagccccactttccaatgttttgtataatcatgtctaccttaaggtaaggatctgcatataaggaagaacatgtgtgatttttttctttctgagtttttgtaaccttgctcaatatgacactttgcaagtccatctatcttcctgccacattcatggactaatttttctttatagctgaatgatattccattttcatatgtaccacattttccttatctattcatctattggtagacatataagttggttcctatcatatagcagcagtaaacatggatatgtgaatggctctaaagtaggatatagagttttctggtcatttgggttacatgttagttctgttttccattttttgaggaccctgcagaaggatttccacaaaagccatattaatttacactcccagcagcagtgaataagtgtttctctttccccacaagctctccaatatttattgtcatcaatctcattataggggaatgacatttaaggtagcctctccactattgcttagattcttagttggggtcatcgttgtggattcctgggaattcctcccctctcctcacatgttcccaacttactatggagatcttgtctctttccccttctggaggggtgggggcccatgtatgcctctcttagggtcctccttgtttcccagcttctctaggattgtggatttgtaggctggtaatcttttgttctatgtctaatatccatatatgagtgagtaaataccatgtttgtctttctgtgtctgggttacctcactcaggatgttttttttctagttccatctatttgcctgtgaattttaagatgccattgttttttaatgctgagtagtactccattgtataaatgtaccacattttctttatccattcatccattgaggggcatctagattgcttccagattctggctattacaaataatgctgctattgttagacccccagaaaactcaggtatccagggtcccaggccatgacctcagtcaccccaatcaagaggtggattcaagagcttgctgcaaactgcatgaggctttattgtttttgtttttgtcttttttaatgagctagccccatgttagctagggtctttcacctacccgccatgccagatggctagcaaagacagctcgaaccgctgcagagagaaattttgtagggcagcataaggggagtgtctaggggtatgcagaggctcacggttggtgagcctccaggcttggagggcttgccctgtgttgattggccaactggttgttatggcccataggccctcccagggtggttgctatgctctgcatcattgctgtgtgcttgtccgtaaagtacacccagggtcgtaaagcatagcaccaccagctaacttctgttggttccttgtcacgaggcaggcacctaacctctagtgactaagacaaggtcatagagcacgtgttactgtcatggctgccgaaacggggagctggtcccttcactatgaacatagttgggcagatgtccttgtggtattaatgtgcatcctttggatatgactactttaaatgccatcatacagccttcatccagtgatgagcaaagtagtcaagaccatgctggggaaacacacagaaacagcttacctgagcaagtaggagctcacatactccagattgacagctggggaacctgcataagatgacaccaggccccctgaatgtgggtgtcagaatgtcagtctataggtcgctggcaatggaaccagtatttatccctagtacccggacttcggaagcacattccccatggagggatactttctcagcctagatacacgggggagggcctattgacagataatagttctgccacaaatgatgtaacagacttctatgaacccccatggaaggtctcaccctctctgaggagtggtttggaggtgggatggggagatagtgagagggagcatcatagaaacaccctctcctcaggctggagagatggctcagaggttaagagcactgactgagtgctcttccagaggtcctgagttcagttcccagcaaccacatagtgtctcacaaccatccgttatgagatatggtgccctcttctggtgtgcagatacacatggaagcagaatattgtatacataataactaaataaaatcttaagaaaaaacaaagacacaaacaaacaaaagaaacaccctctcctcttcttcctcccctacctcctctccatttccttcttacttccccctttctccctccaacgtctcccctctctttccctctacatctttctttctcaatccagctttcctctcagtttaaacacattctcttcatgtgtccagggaaaatggccacccacagtccctatcttacacaactacatcttgcaaatttatcaatcaaagtaaaaaacggaaagtgtccccttctaatagctatctattagtccaaggaaggaccctacatgtctctagttggacctagtgcccatccctgtggcaagcaggctgaacagcaccttggcaaatggcagctctaggaccactggaaatggaagccacctcccgaagaacatgaacgtctcaggctactaaaaatcattgatgtctactatgaccaaaatgtgatttatcaaaatgggcttaaaaaaatctgaatatgccaccaaccataaattaaattttaagttatctgttatctactacaagaagtagtacagtttgaagaactaaagttcaaagccagacctggtggcacacgcctttaatcccagcacatgggagacagaatcaggtagatctctgagtttgaggctagtctggtctacaaagtaagttccaggacagacaggactacacacagaaaccctgcctcaaaaaaacaaaaacaaaaacaaaaaaaaaaacaaaaacaaaaaacaaaaaacaaaaacagggaataaaaggcacacttctgggctatttcacaaaactaacaaagaacaggtcacttccaagctatttatattattccatctccataaagagagtatgctattgaacaaaatcatattgatctcttaccaatgccagagaagaataatgtggaggaagaaaattataggcaaatttcatttgtgattatagatgcaaaagttcttattggaatactaaaaagtcaagtccagtatggtatgaaaaaaagcctaaaacagactaagacaacacaacccagcaaaatttatcctaacaaattactgatacatttcactataattgacagattaggtgagaaaaaaaattatttgtgtcaacagattccatcatcttttttattttttagttataaaaaacatttatctattcattttatttcctatgtatgagtgtttgcttgtacacatgttagggtactatgtgggtgcaatgcttatagaaggcagaatagatggaaagctgacaaagattctgaaatgacagcacagaaagagtttcttctgcatctgctctgaataccaaagggcatcagttcttcagagtcaagattgccacatgaaaatatagtatggaaatacgtacttttgtgaaaaaattgtttgaggtagacatataaaaccctttattttgacaccactacaaatgtcattccccacctgccaaatgtcaccagaacatatgattccttttttaagttctctgttctcttctctttggagagcttttctagtgagaccatttgcacccttagcctgcgtatcaaatccatattgtatgtacatctcatttcctctacagcagtggttctcaacttgtgggtcacaactctcagcctggggctaaacaacacttccatgggggtcacctaagactatcagaaatatcagatatttacattacaattcataacagtagcaaaattacagttatgaagtgacagtgaaatgattttatggttgtggatcaccacaacatgaagaactgtactaaaggtcacacagcattaggaaggttgagagccactgccctacaggataagcaatgcctttttgtattgcacctcatatcatcttgcacacattaagtacactgttattatccaagttaatacagtaaagagactatgggagaggtaagggtgccataaattaaagagaggaagaaagggctgagaatgagagtcttaccctctttccatgggaaagcctccacatctgaacatcttgtatttcaaagtagttagaaaagcagtattactagagcagagcattacacattaatatctggtcaacttccagtgaagaccagaaaatacaacccccctaataaaacagctgaaccattgtggctatttctgaggtgttatgggattttgatttgcatttttctttgtactggttagttttaactgatgacttgagttgacaatgtagaacaagctggcctgtgggtatgtctgagaaatattaatcttgatggttacttgatgtgggaagacccagcttgttgtgacatctttccttaggtgtggcagtagtcctgaagagtatgagaaaggagaaagctcacttagagcaagtaaagatgcattggttctctgcttgctcttgactcttgcttgctcttgcagatgtgatgtgactggcttctggaattcccatcctgacttcctcaaaacaatggactgtatcttgtcactgtaagcagaacaaacccaatgtggttctcagtcaggatgttttatcacagcaacagaaatgaaatgaaaacatctttcataagtttcctaaatgcttcttgctctttctttggttagattcctatgttggcctttcttatcttctgttttcctcccctaaacctagatggttctcctttatcttctataaggccccagccagaagccaagggggctgagaaggtcttagactgtgtgtctaattcagtcctgtcctctgtagtgaaggaataaaagagaactgggattaaattggtctctaaaagtatgaggtctgtgtagtgatgaggaggaagatagggacagtagtaccagctcccacagagggctattgggtggactgaataggattcttctggcaactatcctggttcatggtagacatttggcaaataacactcattggggaactatgagaagcatggaagggattagtaaggcctattctagcttcccattccagtccctccccacccccagtttacaatctgggagtggaggggagaagagacatatgagcaaagcaacactatgatttcaaccattttgtattttattctgtggtccttggtatttaacctagggcctcacacacacacacacacacacacacacacgcacacacacacacacacacacgcacacacacacactaggtaagcattgcagtatgcaggaagacatggtgctggatacatcttgatatgcaggcaacaggaaatggtctgagacactaaggggtaagttgagcatatatgagacttcaaagcccacctcccccgtaatacacttcctctaacaagaccacacttactctacaaggccacagcccttatattgccacaccctttagaggccattttctttcaaaccaccacaactaccaagttaaaaatcaaggaccatgtgacgcttgcttactcagccatgtaatcccagtcctagaaaggatgagacagttcaaggctagcctggactatatagctagaccctcttaaaaaaaattcaaggactcagggacatgatagcttttattgcagatgcccaattttataatttattacagaaaagttatctaagcaataacactgaatttggggaaaaagaaaaacctcaatgagaaagtgttcagggaaaataactcgattgaagttgacccactcagatcactcacacactttccaagaaaagcagaaacctgggaatgtcatttctctcctagcctcaatgtcagtgtatttccagggccccagatgatagcaaaagttgtttctctcaaacaataagtaagcacaacaaaccccgaaaactcaagggaattctgtgggggaaagggacaagaagaattttacctaattatccaaatttccagatatcttctatctgttccataaaacacagaaacagaaatgcctggatgccccctcctagtgataaggcattgtaactcactggaacatgtcttcaaagcaagtcaggcccctttcagagggccagccatctgcactggtgctgcatgtccaattattctctgacttgagatgggtcagggctcaaaagggtaaaatattattttaccacaaacatgcttcacttttctgctgctattcagttgtgatcatatctaattctgatgttagtgaatctcactttaagtcataaagagaatacattccagttaccgctggagatatttcatcagccttcctgttagtgtgagtcatggcagagaatccaaacgctttcgagaagaaaccacaatccactaatgagctctccaaaacctgcccagcacaaccagcaatacatttcgttacaaactcttcttttagtacctgctatgttcctgcattgccttgcttttatgggtagttttttaaaaataataataataataagtacaggatgtaatgactgaccctgaagtgattaacatgttgttttctttataaggaaatcagcattctctttataagccctctggttttgaaatttagggggaaacagcaatgcaaaatagctcagctctcatttgcctttgggacaaagataagtgacattagcattaatatccgagtttcatcagctgcaagcctcacaatttgcttgaccacaggcagtctggtctctcagaacctctccttcaaagccatttcctggagccttcaaaagtgcctatcaatacccatgaaaggagctgtggatgtgagatcctgggctcacttgagccagcctcaaagtgtgaagtattagcacagacagtctttccatttgcagctttattaggcactaacagtgcatccatcccataatgacttggaaacacaagaggtgtgctgtctggatttacaaatggttcagatccaagcctcttgttctaggagctccctcgtcatcttgcaaatcagtacctgactgtctcaacagacttgcctgagcccagccctgacccagctaagatgctctgttctaccagcccacactgcgaatattaccactaaatgttaatatttgttcatattatggtaggaatgcagataatgggaggggagtcatttctagaacaaactagtaatttctcttgtcagtttcccaatcaagggtgaaacatatgacaagaaggctccttaatgagacttaacaggttaaaaaaaaccatattgtctaaaaaaattaatatattacatgcaacttgttttgttcatttgttttttgagacagggcttctccatataacacagccctagctgtcctggaacttgctctggagaccaggcatgccttgaactcacagagattcaccttgcctctggagtgctaagattaaaggcctgcgccaccacttttcataggccaaaagtttataatgttttatgtcagattattgtgcacctggggctagaagcaagcagcagtagaatggaaatgatctacttgagggatcttagagtctcagtgtagcagtttggtcaaaattcagttccccaagtgacaagtccctgagagggtggcctgtgagactttaatgtttcctgagaagtttgccatgccaagcaatgtgctatggagtttacatgcctgtctcacatggtcccagcaggctttaatgtaggtaccctgtctccaccctggagacaggaagtcaaagattaaggaagtgtgccaaagccttaaagaggtagctaccatataagcatcaggcccaaggctttctgcctccttgtggacatcagtctggagtttggattttgccaagtttgcaaacttctgttcctggaagatcatttacccgttccatcttgtaaaattagggctgtgcaacctacttctcaggaaatgggaaggagtctctgaaataaacattgcaaaacaccagaagcagtcctacgattctgcagaatccagctggggtgtgggcagtgtgaagagggtcagcattgtcaccaggtgtggtggtcatgtgagttgggatataaaaagaacggaacactgcagtggtatcactgactcctgaaaaacaaagtttgtgcctattggatttagttaaattcctacacaaaccatttttcttacacctttgtttaaaattacacaagttaagaaaacaggaatggttcgtactctggctgtttttcattcttttgtattaaatttgtctcagcagctaaaactgctttttctacatagtcactcctatcttatcaaaccacaatctctcagaacatgttttactttttgattcctggagattgtcatctgtattttaatatttcacaaaaatagtttgtctcatcatgattccatgaataggaaaccagtctgagaagaaacctgcctaagctgtaatctcatgaccatctctgcatattctgatttctcagtattttggcaaaatcctctggaaacacttgatttacatgatcttcagatgctactgtctggcagttacactctagctgaccccaatatgaagttttctttagagaatataatgaaatccagtttctaaagtatactgccacattcacctctttgcttatccatctcttcatgttggtttgaggggaaatttttttttgagatagtacctgaaatgccaacagttcagggactgtcggagtaagtgggtagggtaccaatgactttcattaatagcactatggtaaaatgataaaacaccaatgcactctacaaggatcctcccctgatagaaagaaaaaagaggaggtcttgggtagaaaaataaaatctgcttgatttttttttaaaacagcagttggaaatcaaaaactcatgtctaaattcacaagaatccttgggaagtttttcaaaaagacagattcccgtaagtaaatacttggtagatatttcagtccagtgggtctggggtgaggctttcaaatctgcatgtccttgacatcaattttattttattttattttattggtttttcgagacaggatttctctgtgtcgctttggagcctatcctggcactcgctctggagaccaggctggcctcaaactcacagagatctgcctgcctctgcctcccaagtgctgggattaaaggtgtgcttcaccaacgcccagcctttgacatcaattttaatgatggacagcaaacatacagaaaaatgttaaatgcataataaaacagcatcaagatactccacaagtggcacaaacaggaaactgatcagaccaagatatggccaagcacccagaaatcctttcctttttaaatccaccagtgccaacgttgtgggtgctaacagcctgacctgggttttgtgcttttgaattacgtattgatagaattctacaatttgtactttgctgtttctgctttctttgttctacattgtgtgcatgaaatccattttgtcatgacatcaatggtttattcattcctgtcgctaagccagtgataaacacttaggttatatgtagctagggtgtgttttttctttctgttaaatctgataccactaaggtgatttgaaagtagttgccatgttgcctttcttcctactgctcccacatatcaaacagtatttttggagattaacagatatctgttggattgtgtccagattaaattttctacctgtattagcagataaagagcagtgagctatcactgtattttccattatcttgcaatgatacagaatggtaccccaaacaggatgataaagagggaaatattggcccatcccaaacagtcatatcttctcacttcacagagaccattccctaaacatcctcaggtctgtccaggacaaaaatccgttaggtcacaggctggcataactacagccacacttggtcaagttaacaagcatttattgagcctgttgaatctgaatactattttaatgattacaaccagttcccaaagaaaaagtaggcgataatcttcagagtcacaaccttcagagtatgctgtttcagcacagctgctcaccaattccagacaaaccttcctgctctttgcctccgtggaggagacaaattcttcagggataaattcctgttggtccaaattcacaagttccaatgtccagaattggtaataacaatgtttctgatcctcctgcctctccctcctgagcaattacaggcacaaaccaccatacccagttttactccatgctggggctctgggaatggaacccagggattcctttaagctgtgagccacttccctagcctagaatgggagataattttttttcctcaaataaaccttgcattatgcagtcttcatctcaagttcagtaacaaccaggttccatataaatgaactattttttttccaaaagaggtatattatagtcatgaacaaaaatgtccatcatttttgtaaaattaccatgtacaaatgtctaaagagtaagaaagtagattgcttataacatcactacttacagtctgccacagaactgaaatgcagttggaaatgcccacaggagcccctggctcttcctcaggctccacctgagcaaactcgtggagatgggctgttgtctgcctagcttccaggagagtttcagcccatatggtgaaacacagggtgcttcacatgtcctaatacagaaatgatcacacagtcctcatgctgcaatcagaaagatgaagatatattatcctccaaggttgaccttttttttttttcccctcccatttttccttagaaactgcccttggtgctagtaagagtggatttttctgagatggaagacaatttgatttaacaagtagtggaaatgatcaaagtttagttttgatggtcagtgaccccaaccttttcttcccattggggagtcactcaggatttctgggtactcacgaatctactgggaagtcgcagatttggggattccagctctaccattctaattttctccatggcaaaaaaaaaaaaaaaaaaagtgcatttataactcgtttcagaaatggacagggctctttttccttcacatctttggtagtgattacattccaaagtaaacaagaattactgtagatccaggatttgtggagtgtccagtattacacaactaaatatgatgttacacaactatttccctgaagttttaactataagttgctttcagtctacatgtatatgcaactcattgaaagccttgaagattaacgacatgtatttttgttgttttgttttgtttttttgagacagggtttctctgtgtagctttggaacatatcctggcactcactctggagaccaggctggcctcgaactcacagagatccgcctgcctctgcctcccgagtgctgggattaaaaggcatgcgccaccaatgcccagccacatgtattacctgatctgaaacatttggaaagaagaatacaaccaactgtcatgtgattgatagctcctgcctattgtaaatcttttctcttaatttttagggggtgggctgcacgtgtcatggtgtgtatgtggaagtcagagagcaacacgagggattcagttctctcctcatggctcctggagatggaacttgggtcactgagcttagcaacaatcacttttaactgctgagtcctctctcacatctgatactgtctattttattttagatttaatttcttgcttttcaaatatggaatctatatactttgaagtccagagaataaaagatatatatatatatatatatatatatatatatatgtgtgtgtgtgtgtgtgtgtgtgtgtgtgtgtgtgtgtgtgtgttgtaattatataatatataatcatacatacatcatatatatgtgtgtgtgataattatatatatatatatcatacacatcatatatatatatatatatatatatatatatatattagagagaaacctagattagctgaaatggttacaggagggcaaatgaacagtaacagtataaagagacaaatagaagacagaggatgttggcttccctcccttccctaccctagcacgtggggatggacccctgttgacaagcactgtgtagtccttcacagttaccacacactccatacatttagtacctgactgggctatcttagcgcccctggagaagaaacatcaggtgtgtgtctagtgtcatgtctaagttttcaggtcttggggtcataatacaaggattcaaatcttgaccaccgcaattgtttcctgcctgcatgagcctcccctgacccttttggagacagggtctcaatctgtaactctggttagcatggaactctcagaaatcctcctgcttcagcttcttagctgctgggatttcatgagccaccacacccagctccgtgtaaccataagtcatcaacttctctgtgcttcatctttcttattcataaaacagtgatgataataaaattctttacttcacagcattgctgtgaagacaaaaacgaggtaacccaaggcctcaacatacagcctacaacataataatccttaagaagatgttaggtgttatttgtacttggcatttgcttatatgctttctctatagggtaccacaccatgtggcatggtttgagcccgaaaaatcctccttgggtgctgctttcagcacataggcatgtgatgttaatttgaagactgtgggtcctgagggaggggtctggctggtagcagatcactatcaaagtcctttgaaaattacaaccaaaatctctactttctgagtcatcagggtagagatgcatcaatcactgcatcaccctgcaggtgacactgcagatgtagccactgtgcctgttttccctggaagaacatctgaaatctgcctgaaaccaggagccaaaagaaacctttcctctctgtagttgtttctgttgggtactcgctcacagcaaaagtaactaataatggatcaggaaaagttctatgtccctaagattatgtgttcacccatatctcctttgaggtcttgatttctacatttcaatcttttgtgtacctggaatctgaatatgtggataaggagggaatctaacttttctttctttctttctttttttcaaatgatataatccacctggaacctcagtgtgtttattatgtacagcacagcaggaggagttagctaatctctgtaggaagcagtctgggctataaacagccaggaggaggaaactggagttgctagtttttgcacactcctatttggaacagagaaaagtattgccattctgtgcctgactggagatcttttacactcccttagcctgaggcattagtgcttggcatggccttgtccatgaagcgttcagccagggctgcttcgtctatacacacacacacacacacacacacacacacacacacacacacacacacacacacggcttccacaaggacaggctcatttgtcaccattggtttccactccatatttcatcctactggactgtcttcaggagcaataaccttcatgcagctatcatctaagtcatctatgagatcaaggccttctggaatttctcatcaggccttacccaaggctgctcctgagatgggtctttctttcctctactcttctgaactatgtctgtggctgtttatttagtttttgtccttcatcataagatctgcttgtaaattacctgtcttattcactgttctattgctgtgcagagacaccatgaccatggcaaatcttataaaggaaagcatttagctggggcttgcttatagtttcagaggtttaatccatttttgtcatggaagggagcatggttgcatgcaggcaaacatggtggtggagaagcaactgagagttctacacccagatccatgggcaggggtcagtgggcctggcttgggcttctaaaaccacaaggcccacccctagtgacacacttcctccaacaaggccacacctcctaatccttctaagtagtgcccctccctgatgacttaagcattcaaacctatgagtctatggggggtcattcttattcaaaccaccacacagaccatgaacatgcctctcataagtttcactgctgggctttatatttctaaggagcctcttgtgggctgcaaaagctcaacccacaattgtgaatcttctcaaaggttctttaataccttcccttcttatgcctcttcagctccctgttcaccaggcagtaggatagtttcagctccattgcattctgatgggactgccatcatatatgtggtccatcactgactgagatgttactacagggtgtctggttgtacctacacctgtgcacacaagtccctattgcaatagtgtagtgtgaattctaattggctttaataataaaaactcagagtcaaatataggaattaatgctgaaagaccagagaagcagaacagccagccactagttcttacctctactgaatcttaaaaccaaaggggctaatcctctctctacaaatcctcagactgaatgccctgagctcctgccttttcccactttatattcctctctccatccagccatcactcctgtcttcacctctctagtgctggtattaaagacgagtaatcccaaaagctgggatcaaaggcgtgagctctgtttctcttttagactggatcaatctcatacaacccagggtggccttgaactcacagagatccttctgccttggcctcccaagtgcagggattaaaggtgtgcaccaccactgcctgtcctctatggctaactagtgtggctagctttgcattctgatcacaatagaacatcaccaccactctggaacattcccttagaccaggctttccccatcaatttcacttcatagctccccagtcatccactgttgcggtttttcactacagattggttttgcttattctaaatttcatttgaaatggaatgacagtgtttgctctcctgtgctggagttcattcttgaattatttatgttggtgcatgcccagtagcccattcttttacattgatgagtagcattccaggtgtgactattactattccagttttctatttgggatacctcctgtggtggttttcatgaaaatagctacttctccagcaccatgtctgcctgtgtgctgctatgcttcccgctgtgacaataatggattaaacctctgacacattaagccagccccacttaaatgtgttcctttataagagttgctatgatcatgcaatggtgcctcttcacagcaatagaacattgagaaaggcaccatatctccattacttcccatttcatttttgttagtaagatctctagttaaagcttgtacttagaacactgatttttttctgaaatttccattttgttctaatatagtatttctcttttctgctaattgtcctctttccttttagggtgagtgtttttttttcctttatcttcatgactgtgagaagataaattctttaactttaaatctttactaactcaacatctgagtcatctccgatgttagtttccatttccctcagactcttctcttgaatatagaaacaaatttttcaacgtggacattttgcctgaacattttgcattctgtgttagtcagatgtgctgagacaaaatacccagaaccaacaattaaaaagagaaatggttacttgggctcagtcccagaggttccaatccatcatggcatggaaggcatggcagctgggaagcagagagaagaagagggtgtcctctctccctgtcataacatctgaacccccagactacaagcatgacagggtggatgtttccttctggagatgccctcactgatgcccagaggtgtgccttactgttctcccgggcacttctcaatccaatctacaaccaagatggctaattgtcacatattccatgttggcaccacaaacatgtagtggttattgttctgctcctttaatgagggccagttctctatttatttcattaggtaatgtagggagacaccctagccccaccccaggcaacccggacaggtgtcaggtataccaggacatgcccatgagggcagggtgaagggaagtaggggtgacataagggaggttcttaagggctgcacgtggagatcctggtccttctctcttctgctcccccggctacctgcgctggttccagctcctcccctctcgcttgatttgtgtatctcaataaagaaaaccttagcactatctgctgcgggctgttcactcctcaaggttacaatactttggctgagctcagagtctagactgtttctattgttgtggtgaccaataaagttttggttaaggacttctagactcatctgggaagcttgcagtctgcctcagataaagatgttaaccagttagtgtgctggatacatgggttcgaagctcgggagagatatttgaactagatatacaagattatgaagaaccaacataaagatggtagctatgtccatcagtgtagggaaaaccacttaaggacaaagtgaggagaaatgagaaagtgcttgttttctgtggctgtcctaataaagtgccatagacttcgtgattcaaaggacagacacttacttcctcaagattccagaagctagaaatctaagaccaaggtgtgtggagtgttggtctcttctgaggactctcagctcggcttggagaaggcggccttctgcatccttgcatggtcttgcctctgtatatagctgtgtctggatttttagactgtgtctaaaaggacacagtcattttagaccaggatagcccccaccacaccagtcatctcatcatctaatcaacaccatatcaacctaattcacatgttaaagatcctaccctcaaatacagtcacattcgagattctagggtttaggatacctatgtattattagagcagaggcctgggagtaagatggcatggcagtgtgcagcccacaacaggcaagtgagatggttcacagagtaaaagcacttgccataagcctgacaacctgagttctgtcaccaaaacacacattggagggaaagaaacaacttccagccaggcagtggtggtgcacgcctttaataccaacattcgggaggccgaggcaggcagatctctgttgagttccaggacagccagtgctacacagagaaaccctgtcttggaaagaaaagaaagaaagaagaaaccacttccaaaagtagtcctctgacttctacatgcaagcagtggtctctgcatgcatgggccagtgcatgggcacaaagcgcgcgcgcacgcgcgcgcacacgcgcgcacacacacacacacacacacacacacacacacacacacacacacacacacactgaataaatacaatcaatcaatcaatcaatcaagacccaaagaactctatcagttgtggtcaggaagagaaagaaaggccactggaaaagacttgaaaacatgtcatagaattatgaagaaatcagtaaactgttctgggagtggtttccaaggtatcatagtcaacagtgcccaatgctgctgagagcaaacgtggtaaggttggaagctatccaggggacctagtgcaagggaaaccatagtgatcctgatgagaattgctatggtggcatgatggaaataaaaatcttgctgagatagactgagcagcaagagagaaagaaatccaggcgctgaacactggggttggaaactgagaacacagaagaggaactctgttaaaggggccagctccccattttggcagccataacagcagaacacatgcttgccataaccttgccttggtcacttagaagtcagatgcctgcctcgtggcaaggaaccaatcagaagttagctggtggtactatgctttatggctctgggtgtgctttacagacaagcgcatagcaatgacacagagagcatagcaaccaccctgggagggcctatgggccataacaaccagttgaccaatcaacacagggcaaaccctccaagcctggaggcacaccaacccttaacctgtgcatacctctagacactccccttacgctgccctataaagatctgtacgcggcggcttcgaactgtctttgctagccatccgacatggcaagtggatcaaagacccgagctaacatggggttagctcgttaaactacaataaagtctcatgcaatttgcatcaagcttttgctccattctgtgattggggtggccgaggtccttggctaagatcctggaagcctgagctttggggtgggggggcgggaggggggaggtgtcttacactgtcaagcattgctgtggcatttgtttgagttcatctcattaaatcctcactttaaaaaaaaatgccttttggcttcctttactgaatagtactcattaactgtatttaatgtttgttgggagcctatgtgacagatactgtctctagtgctagggtcacatctgtgaacaaaacaaatgactgtgctctcggggaacttaaattactctggaaacaaacagaccataagcattaaacctaacaaaaaaatatattttggttgccaaaaaaataagctgtaaaattatatagcgtgtttggaagtataagtactgtggaaaaagaaaagaaagcaaacgggattctaagaaatggggcaagaagaaaactgaagtactaagtatcaaatatttgagtttaaattatgaaaaacacagtattcaacattagaatgacaaaaataatagaaaactttagaagttcaaatgcatggggaaacacaccatgttcatggaaggcaatcgtttttgttagtattcaggcatctggaccagactgcccttagggtcctggcaggatacgtcctcagctgcagccactaagagtgccacctgtgctcattctctatgttcccttttcaaagggccctgcccacctctcgtgtctctctctctctttctcttctaccgctcttgtcctcagggaccggtatctatctagtactctgtccccctctctgttccttctctcctcttccaataaacctcccatgtgagccctgttgtatggtgtgacaccttcccaccatttttaaataaatagtaacacttttcaaatttaactatagattcattttaatcaagtgaaactgtggcaatctagcttttgcaaaagctgacaattcaattttaaaatgtttatgtaagtgaagaattctggaaaagccaacaaaattatgaagagaaaaaaaatgggggatttaattactgaattccaagacttgctatacaatgacacaaataggtccgtccacttgtcagtttcccactaggaaaccaagatctacatacctgctccccttttaccaaaatatcttccatacagtgaaagaatcataggagaatagccagttatgtcaaatactttacagaagacacaaactgactagacatatgttaatgtttggtaatgttctccactgcagagaacaaagccaaacattaaggaaattcttgatctcagaagaaaacaactggcctgctggaaatttatgttaatttctgcttgtctcagtattttccaaaatatattactcggaaatagagtttcatgaaaaggaaggaaagggggaagaaagtgggattgtaagtagccaaagatggcagttttgcttttgaaaccctttgtaaaataactaatgttcaatgaaattacacactttcaaaactatctcaggcaatggggaaatgtaaatatatatgtgtatatatgcacacacacacacacacacacacacacacacacacacacacacacgtatatattctgattcaagaataaaaagtgcctggagatggtggtgcacacctttaatcccagcactctggaggcagaggcaggcagttctctgtgagtttgaagccagcttggtttacagagtgaggtccaggacagccagggctacacagagaaaccctgtcttgaaaaaacaaaacaaataaataaataaataaataaataaataaatatggagaaggttagttcttatgcttatgggaggggaaaccttatttttcaatgacacaaagcagaagcagggtttgtagctctcttaattgtctgttgtggccttgagtaaggaccactttaatcttataaatttgatttctttcctccagctgcaatagcagaaatcccctggtcagagctcgctgtggtgggagccaaatataaatgtgtcttaataaatggaatttcaaatatcaaatggaaattcccacactgcccagttagaaattccctccaattttcctgtttcgtgctctttatctattgaccacagtttggtttcagtgtctctagaggcacagggttaaaggcacacacttacttagggcaggagtccaggagaggaagtgggatgaccagcagggaggaagttgccacaaagtcagagaggaagggtctgttctgtagacttgcctgtggctgtgctcactcaaatgctcaaagcaggcctatgggagtagctagaaggaaaaaagtaataaaaatctaaaataactagatgattagttctggggaaaagaacaaacaatgaaaggagggctgctaaaaccttgatggggtactcctgcctcaaacacctttcaggatattttgccatttctccttctaccttgtcatagcgaatcctaattagaaatgatctcaactcatcggttctcaactttactaatgctgcgaccccttaatacagttccacaacagcgtgttgtggtcaactccctaccataacattaatttcattgccaattcataactctaattttgctactgttatgagtcacaatgtaaatatctgttttcctgtggtcttatatgacccctgtgaaagggtcattcgacccccaaagaagtcaagacccacatattgagaactgttgtcttacactaatctgacttggaaaaaaaaaaaaaaaggtggcgataactttaggtaggttaaagaactattaactatccatctacagccagagctcactcaatcaggtcattttctccttagactgaaactatttgtagccagtattgaaactgtgattgacagagcaaggaagataaggagtctggagtcagggttgtgcctgcggaaagctgtgtcatggatagtgacgcagctaaggtcacaattctagcaattcgccaccaactaagccaatggttctcaacctgagggttgtgacccctggtggggggaaatttgataaacaaccctgtcacaggggttgcatagacatatcctgcatagcagttgttttcattatgattcataacagtagcaaaattacagttatgaagcagcagtgaaacagttttatggtgagggaatcaccacaacatgaggaactgtattacgtggtcatagaaacaggacatggagtctacaacatcaatgttcagccagagaggctaggaacctgaagagcatatgagaggcagtggtttttcaacctgtggggaggtgttgaccaagaaataggatgttttgtttactaggtcaccagggagaacaaagaagtatgaatagacaaatatatgggaacgtagcaagcccacatgtcttaagaaataatacattactgaatccttgaggtacaaacgtctgttgtacagatcatttctttcagcccttaatgtgccaagggtcagatgttcttagaggtagcatgtgtttcttcctcagacaaggcttttcctgttttgtttctgtaacaaagttaacataactaatttgggaaccagtcctttctgtgtagttagctgtctccatccctcttgacagactgaacaaaaggaaaatgtatgaacaatggaagtctttaaatgaagcgagttaaatgcatgagctttaaaagatttagagggattgatgaatgccatttcttcagctaatgtttcccacagttgttcattttccagtgtaggggccttagctgctgccatagccaagacttgggagtgcaacttcagtacatccaatgtgcatataagaccacagatgatttttaataccaactattcatattctgattcattacgtggaagctgtggaacacaatagtgggttagatttaaatgacctcttagatgttataagcaaaccaaggcctgtatttgttcacccaaacaaataatagagtccctcggtggctggatttcaccaagaatatatttttttgttttgttttgttttgttttcaagacagcatttctctgttgctttggagcctgtcctgtaactagctcttgtagaccaggctggtctcgaactcacagagatcagcctgcctctgcctccatagtgctggaattaaaggcgtgcaccacctggccaaggatatcttaattcgcgtgaatttaagttttcaaggtatcagtatagttcttttaaaattcttagatgaaaaaatctggttttcacctcctggttcaaggcctgggccatagtggctgatgtagcaataaatatcagctaagatcacaattccaacaattagccagcgtgtaaaccaatggttctcaacctgcaggttgtgacccctctgagtgggttgaacaaccttctcacaggggttgcgtatcagatgtcctgcatagcagctatctatgttacgattcataatagtagcaaaattacagttatgaactggcagtgaaataatttcatggttgagggtcaccacaacatgaggaactgtctaatagggccacagcactaggaaagctgagaaacactgatttaaaccttttggtgcatctctgtagttgacttatcatttcatgcatgaaggctacagttggatctcttgctaaggctctttaagatgaccagaaccaaagtaaccactggtcttttaagaatcataaacacactctctgggaacccacaggccactgaaggtggggaagcatgtaggcaaactccagctcttcacttctccctccattctccccattccaataccctagctcacccccagctctgtagtgaaacacctactgaagtcttcccttcctctctgacccctatctccaacagatcacatagatggcctccgaccttccttcccgactcattccattattgcagcctccaacacctgcaggcatgtcccagggacatgcaggccttgcaggccagggaaacgcttaggctaaccacagatcttcacctgtccctactctcttccaaatccaaccccgggtttgtaacctcagctctgtagcaagccgcctgctgtggcctcctttccccccacccccaatctccaatggataattcagatctccttcaagctttccctcaactcatcctgttatcccagcccccaactccagcagctttctgtgggaacctgacagagcagcaagcaagccagcaaagaaggagtatattttacccaccaaaactttcaaatacaatagaagaagacaagatattccatgataaaatcaaatttaagcaatatttatttataaatccagccctataaaaggcactagaaggaaagctccaaacaaaagaggttaatcacaccaaaaacaaaaaacaaaacaaacaaacaaacaaaaacccacaaggaataaacaattccagaatttgagtcccaaataaagagggaaaacacacacacatcaacacaacaatagcaaaaatgacgagaatcaacagacactgctcattgataactctcaacatcaatcatctcaattccccaagaacaagactaatagaatgcatgggactacaggatccatccttctgctgtatcaaagaaacacccctaaacatcaaggatagacatcacctcgttgtaaaaagttgggaaaagatactccaagcaaatggattccagaagcaagctggtgtagccattttaatatctgacaaaatggacttcaaaccaaaactaatcagaagagataagaagggacactacatactactcaaaggaaagatccaccaagaggacattgcaactcttttctttcaaataatttatttaattttattttatgttcattgatgtgaagatgtcaggttccctggaattggagatacagagttataagttgccatgtggatgctgggaattgaacccagttcctctggaagagcagccagtgctcttaactgctgaaccatctatccagcccaacattgcaactcttaaatacaagggcacccaagtatatgaaagaaagactattatagcttaagtcacttattgacttacatgctgatattgggagtcttcaatacccaactcttgccaatggacaggtcatccagacaaaaaccagagaaatgttggagctaactgatattctaaaccaaatgcatctaacaaatatctctagaacatttcacccaaacacaaaagaatacaccttctcagcacctcatgcaactttctccaaagttggccatatactcagacacaaagcaagtctcaacagatacaagaaaattgaagtaactccctgcatcctatctgaccacaatgaattaaagctggatatcaccaacaacagaaataacagaaagtttacaaactcatggaaacaacttgcagaggaaagaaaaaaaaaatgggtcaagacagaaataagaaagaaattaaaggctttctaaaattcaatgaaaatgaatacacaacatacccaaacttatggaacacaatgaaggcagttctaagaggaaaggtcacagtcctacaagtctacatttaaaaaaaaaaaaaaaagaaatatctcatactagtaacttaatagcacacctgaaagctctagaacaaaaagaagaaatcacacacaaaacaagtagtaagcaagaaataatcaaactcagggatgaaaccaataaaacagaaacaaaaaaaaaatacgaagaaccaatacaaaaagttagctctttgagaaaatcaataagatttacaagttcttattcaacttaactaaaaggtagaaaaagcatattcagattaatgaaattaggaatgaaaaggggaacatagcaagacacactgaagaaactcagagaatcataatgacatatttaaaaaaacaaaacaaacaaacaaaaaacccctgtactccaccaacttgaaaaatctaaaagaaatgaatacttttctcaatacataccactttaaaaagccagctcaagatcagataaccattttaaacagatttataacccctagtgaaacagaagcagtaattaaagttctccaaaccaaaataaagccaagggccacatagattcaatgcagaattctacaagacttccaaagaagagttaatgccaatacgtttcaattactccacaaaatagacatagaaggaacattgcccagttcattttatgaggtcacagttaccctgatacccaaaccacataaagtctcaacaaagagaatgaccaatttcccttctgaacacaggtacaaaagtactcaataaaatacttgcaaactaaatccaagaacacatcaaaaagatcatccaccatgatcaaataggcttatgaaaatcagtaaatgtaatccaccatgtaaaaaactaaaagatgaaaaccacattatcatctcattagatgcagaaagggcctttgacatgataaaattcttggagagattatcaacacaagggacatgcttcaacaaaataaatgcagtttacaacaatatagccaacatcaagttaagtggggaaaaaatcaaagtaattctactaaaatcaggacaagacaaggttgcccactctccccatacctgctcaatatagtacttgaagtctcagttagagaataagaagcatgaaggagatgacataaattggaaaggaagaaatccagtgtctttatttgcatacgatataatagcatatataagtgactctaaaaattccactgggaaatttctacagctgaaaaacactctcagcaaagtagctggatacaaaattatttcacaaaaataagtggccctcatatattccaatgacaactggtctgagaaagaaatcggggaaacaaccccttttacaataagctcaaataactctaaccaagaaagtaaaagacttgtatgataaaaaggtttaagacattgaagaaataaaagaagagaacagaagatggaaagatctcccatgctcatggatcatgagcataggattaatatagtaaaaaaaaaaaaaaaaaaaaaaaaaaaaaaaagaaagaaagaaagaaagaaaaagaaaaaagaaaacaaaagtaattctaccaaaagcaatctacatattcaatgcaacctcccatcaaaattccaacacaattcttcatagattttgaaagaacaatctgagcttcatatgaaaacacaaaaccccaggatagctaaaataatcctgaaaagaactactagagatatcaccatccttgatttcaagttgtactacagagctatagtaataaaaactgcatggtactggcacaaaacagacacattgatcaatggaatccacatacctatggacacctgtttttgttttgttttgttttgttttataaataagtcagaaatacaccctggaaaaaagacagcatcttcaacaaaacggtgctggtcaaactggacatctgcatgtagaatcataaaaatagatctatacttatcaccctgcacaaaactcaactcaaaatggatcaaagacctgaacatactggatacatgggtcatcaattgacccacagtattcaccaacacagcctctgtgtggctccattgaccagggtcagacatcttttctggactccaaacacagctattctcatgacttatacaggcatactctacccaagaatgaaggtttgaagagcctaacatgtgtgtagcttgagtgtgagtgagaaatgaaaggtgtcaaaccgaggaatgaggtttttgatgcaatacagcaggtggattttgatgaaaaccagaagaatctagaaaatccactcaaatattaccataagttaagggacctggtaaggtactgcaagaaaaaaatgtgtattatgtaaaatagaaaggtgtgatggcaagtccctgctcagtttttgaaacaggtacacttagctctttaagaaggtgttgttggtctacagagtgagttccagaacagtctccaaagcaatactctgtctcggaaaaaaaaaaaaagtgttgttttaatccaggtcatctctaaaaggaaagtatatcatatatacagattcagaaacaatgttaacattgttgagaaatctttaagaatcaaagagatagctagtttgtggtagcacatgcctttaaccctggcacaggggaggcagagacaggcagatatctgagtttggggcagcctggtcaacagagcaagttccaggacagccagggctctacagagaatccctgtatccaaaaacaaacaaacaaacaaacaaaaaagcccaccatagagatagtcatcaatttagcaagctgtgtagaggaatgtattggttggtgttttttgttttgttttgtttctccttcagtccagtatttagctgttttttttttgttgttgttcattttgtttttagagacatggattctctgtgtaacagtcctagctgtctagaactcactttatagaccaggctgggctcagactcacagagatctgcctgcctccaccaccacaagttgaatagttttcttaatcaagtggaatacagcaggagcctcaagagtcagaatctcctttaaggatatcaagacgaggttatagtttaactacagaaatatgtaagagtcttttcactaagttaataccatgtaaatggaggcagagcttttttgtcccaactgcccagtccccaaaaatcacacaaaagcctatattattatagatcatcttgtagctcagacttattgctaattagttcttacaacttaaatgaacccatttcaattaattgacattttgtcatgtggcttcatgactttacctattttctagcacatcttgttcctctggcgactggtttgcatctctctcaccctgcccttttttctattttcagtttggctttcccacctacccttgttctgccttacttaggccaaatcagctttattatcaaccaatgagagtaatgcatattcacaacatacagaaggattattccatagcaataccatccaatgttttgtttgttttgttttgtttgatgaagacagggtttctctgtttaacagccttagctgtcctggaactagctctgtagatcaggctggcctcgatcaaattcacagagatctgcctgcctctgcctcccaagtgctgggattaaagatgagtgccaccaatagtttttgaaaaccacttaatgattttaaggatggcatgttgtgggaattattgatgctggcccaatagccaatagtaagtagcagcttggccctatggatatattcttctctgaagagacagaccagataagaaggggggcaggaggagctatgtgtctttcttggactgtggagggatggctgaagccaggacttggtgaccttccccagacctttcccatcacccattttggggatcaggggaggtgttgcagctttgttctgtattgtgagtgtactgtattgtttgtacctgctaataaacctgacttgatcccagaattccatccctctttaatagtgtttaaagctgaactttttgagggtataaggtaggtgtatccacaatatttgccaactattaaaaaggtggtatttgttgtttttgttttttggggtgatctttgaacagtaggggttttgctttgcaaataatagtgttcatattgtatgcatataatatatatgtatgtcatagaatgtataatgcaagcttgaggacatttttgctgccctggcaagaaggcatcttccacaaatcattgacacacagtagggctgttcatcatcccctgaggaggaagcatccactaacatttctgtaaaggttccttattattaagttcatgtgcagaaaaggcaaactttgtttatcctggtaggtgaaaggagtagcaaagggaagtcttttaaatctatcacagtaagaggtcaatatgcagaaagggctgtgggcaagggcaaatctgattgcaaaggccccatgacctcttcactacccatttgtagcagtaagttttgtagctattgacatttatttgggggagggatgtgaaaaatgggagtatcttaaggactattttgaagggccacatattccctgcatcaaattgttctgtaccaataatttaagatgttgcatttttccaggggctggagagatggctcagtggttaagagtactgcctgctcttccaaaggtcctgagttcaattcccagcaaccacatggtggctcacaaccatctgtaatgaaatctggtgtcctctttggcctgcagacatacatgcaggcagaacactgtgtaaagaataaataaataaataaataaatctttaaaaaatgttccatttttccttttattggccattaatgggagactcagtctactatatcgtagaaatagcatgtatctgagttggtgcattaccactgatcattcctataaatttggatatcctaaaccaaattgaacttttttttaacagaagttttaattggcctgaagccacagccaaaggagtgtggctgctgtttcaggtccacagacaagatgcctacacttcatcttagtatctcagacctttttcttaccatttttgagttggagctccaagataaatcaaagtggaggagggtgaccttgtaggctattttcatggctaaagttaaaagcaattatagcaacatcagtgccagtatcaataaagataggaaattcttattatttaagtaaagagttaaacggggttgttttcttgaaatgtgctgtgaccacatgaaatgatactttcctgtacttccaacaacctggttcctctttctaaacttctttggttcgtgggaacatcaggtggcaacagcaattaagcaggagaatatcccttgtcaatacatttctcttgaagacattagtgctttaatttttctataacaatctttatcagctctaccaggaccaacagtaatgcccttaaaatttagactaattttccctaaaattaatcccactggatctgggggaatggatccccagattcccatgtgcatggcttgtgtgcccccagattcccaaagacatggcttgtatggccgttacaattctaagaaccatactcctagccgctggcaggtttatctaatcctgtgctccctcaggttgctgctgagagatgaaacactccgttgtttactagatatgccccctaagttgttgatggatccccagagagggaccctgtggttgtctccagatgcaagggattttccttatcaaatttggatatagattgattatcctaatgagtcccattgtaacacccgggacacaagcctgatggaggatgtgtagaagttggcgtgttaaattatcattagtctgtcaaggagtcacagaggtatctacattccctggcttcccacactgaaagcaaactgatttagttggtctaagtgcttaccataaataaatgctgtagcaaagacatcatgtttatatttctgcatttcaatattttgggctactctcatgtaattgctaatagtgtgcttttgtcagctaagagccaaactcctttgtgcatccgcattaacacattgaaagctaaccatttggttaagatgtctgttgtcttgagcactgggcccctgtcttcttactgcttttgtaaggtgaccaagaaaatcatcaaaagattctgaaaggcccagtaatgtccttataaaatgtgaattggctccctgggccaattcagatgttgccacaatcaccaaacagcaagtgacatttcttcataggctctggcagatagtcaagttagtgttgtaatggagacaacttattttcattttctgtatattgtttcaaagggttgctccaacttaggaatatgaggaggaaaggcaggagctgtagacacagacctctcgtactgacatttgtcctcctgtgtccttgaaaccaagacagcttgtgttaaatgctcccaaaatgtttccaaatgtggtctttaccagtgtccgtgttaaaaagcagtaatagggatttaaatacctccactctgccttcttaaggatctaaccaatctggtcccatgtttccacagccagtacatccacttttggaaacctcgagcttgccagcattacacactgacagttcctgtaaagccccagcactaaccacagcccctgcctgtttcagtagacagcacaaaagagccaaataacgatgtgaaaatgattctatcccattgtttcccaaccttgaaaaacccccatcaagccacgacctggtaaactgagttactcaccaatcaacgtctctgttctgagcccacttggagagacagcagaactaagtccccccaaaagactcagagtccacaatgtgaattttcagcaggggaaactgggactcagagagtattggagaggctctaagggtccagagtgtctctgatgctgagttcttacagacacaattgcacataaaaatactataccttaatgtgccaatggtcggaatgctcttgggtgtgcgtgtgtttctttctcagacaaggctgctgacagcaaagtggggcatgtggggggctctcagataataacagagaagtacagatgtataaaggttagaaaaggatgctgatcacacacgatccaattctaatggctcttgcagcttagctgtcttcctttaactcttcctcactcacctcgttttctgttggaaaatcccagaaggctgagactggggccaggttctgttatgagagaacttaatttttttaagttaggccaacaagttaaaacaaaaactgtctattattatgatggccaaaagcagtacaaatctccaaagacctcctttcatgagaaatttggggctataccctacccatgagctaggagttcccctcaatatgcagttaacaaatacttactgagtgcctactagatgcacaagaactatctctaccctcacaaagcttaatgaccaaccatatttgcatcttaaatgtcacacagaagcaaagacatgggttagaaggaaatgaagtagcgagggaccaaaaattaaaattaataaaagtttaaaaacttaggccctgaaaagagaatgtctactggaaaaggaaaatttaactccttaaatcaggagtgccatgactggcgcctgatcccctgctctcagagaaggggagatagctgtccaccactcctgttagcattcctttgctaattgctggtcataaagatcccccagcccaggggataactgacagatcctgtgaccctatagccctgcaagcccatgccctgtcttatctcagtcaaatgtatctcccttaaaatgtatagttattgactaactctgtactttgtatgacctgaagtaaccatggaaactctggaatttgtggccttcaaccttatggtctgcccctgtaaaagcctctctttttggctggttggcatctcatttggccgccatgcagtgagatcctagctggtcagcttgaaataaaaagaaaccttttgcttttgcatcagagtgtcgactcctttgggttagtctctgggctccgagaacctggcacaacagtaggagctagaactcagctgcaagcagctacaggaacacaagaagggactcagccctcacttgatggacaattctgagtagaagatcatctacaaaactggagtctgctacactcaccagtgggatcaatgccaattggtactctttgcctctaagtttataatataaaactggtggttttaatattctataccaatgttggctttggttgaggataactctctcaatagggatggctagtgaaagtcctttagcagaacactcaggtgccaggaattggtggacatcctgcactgcgcttatgtaatgaaagcaagagaatatggctaggatacagttcttatcagtgatctccactgattcaggtatcccctagaaaacaggaagatggcacaactaagggatcgttcttatctccagctcatccaccagacctctctgtaagccatttctaaccacctaccaaagtattccacatggttctggtgatctctgtgctgagaaacacagctctatacaacaaacactggctagaagagtggacacaaagtttgtagaataagcatgtggtaatgctgtgcaataaccttctgtacactgtgtaaactatgctgtgattggtttaataaagaagctgactggccaatagctggacaggataaggttggaggagagccaaacagagaatgctgggaagaagaagaagggtggagtcagaggagtagcaagcagatgcagagagaagcaacatgggcgtgacatgctgagaaaaggttccaagtcacgtggcaacgtgtagtttaaaactagattgaaaatgtaagagttagctagtagccgagtgttgctggcgcacgcctttagtcccgcccctctggagtcagaggcaggcagatctctgtgaggcctggtctatagagtgagttctaggacagcctccaaaacaatacagagaaaccctgtctcaaaaaagaaaaaaaaaaaagagttaactagtaacaagcctgagctattggttgggcatttataattaatattaagcctatgcatggttacttgggagtggcttgtgggacagaatcttctgcctacatggtaatgttttccgttgtgtcctttttgttttatagtatgtgtgtatacatgtataatatatgtatgtgtatatattgtatatttacatattgtcgaggcccataaagatggctcccattcatcttgcctcaaggccagagagttcaaaactgtccttaggaagtccaaagacctaaaggtcgaaggcttgtctacttcaggatgttttggtcttggtagtggatgtcttaactaaataataaacttgggctcaggtgtgtttattcttgaccctcaaggtcagagaacaggtgtgattaccaaatgcttggaggattaatggaagtctgtttgttccttatacacaataatggaagtcttctgccatgtgcccctttgggttggggtacttaagaatgttgaagaataaacttggggtgttcagtattgactggattgctctcctgactctatcctgtgtctctttcttagtgtctttacctgccatttctcaatcaacactcccgtctcaggtacgaaccaggcaagtcagttggatctgactcttgagacccacaaagacaggttcccacaacatatatgcttagcattattagatgctaagagacaggaacaaaacagctcttccctcatttgaactttggacttcctaaactggaaggcaataaagttctgtagttttaagccacgaatgaggagcgctttgttggttaaccaagacccccataccatgaaggcctgtttggcaccgtaggtcttacacttgcatcccatcagggttgtggttttatttgggtcagaacaggtgtctttagatcaccttccactctgctcctaccccctcacaacttgttttcacttttctctcaggaaactggaggcctggatggaaactctgagagagtagcccacagtcaacacctgtgggaatgagttcagagcccagtttccaaggcttcagacatctgaagaagatggcatttgtgactagctgtgaggaaggagaaaggatacaatgacaaccaaatgctttggcagagccagcagcaaggcaggacccagcatttctactgtgtctgggcagcatgtgacagccatgctgagaagaacttagggattgtctttttttcacccatcaacaggacctgggaaggccagcccagagcatgggaaggaaggaaagtcgagggcattcaggaagtgtagcaaacaagcatacaagggtttttgtttgttttgtgtattatatcaagaagccaattgatgtaatacaggagagccaaatccaactctaaagtttcatttttcttttttcttttttggttccctagagagctgcacacaagaccagctcccagcatggctgtttggccttgtcaacaagctaatggaagatgatttggtacactacccacacggggtaaaaggaacccatgctgaaaccaatgctgatcagctggaaatagagtctgctggagctgcaggagagatctgggagatgagctggtaattgttatccaagcagtcttccctttggtaagaccatgcacaaactcattatgaacttctcgcataaagatctgtcaccgtggcaaagcagacagctcagaggaaaaggcaagaatggggacccaagttcggattctaagcgcacatgcataaggtagctgtgggtctgtcaccccagcactcacagagagagggaggatcccatgggctttaaccagtctatcccaaatcatgagcaccagatttagtgagagtccctgtgtggtggcttgagaatgagaatggtcctctgtcttaattagggttcctattgctgtggagagacgcaatgaccttcagaggtttagtctactcttgtcttggtgggaagcatggtggcacagaggcagatagggtactggagaaggagtaaagagttctacatctggattggcctcggggcctagttggacattttaagtccaaagcccatccgaaatgacacacttcctccaacaaggccatacttcctaatgtcactccctaagcattcaaatatatgagtctatgggggccattctcattcaggccaccacacctaataggctcatatatttgaatactaggctccccagacagtgaactgtttgggaaggattgggaggtgtagccttggaggaagtgtcacttgggacaggctttgaggtttaaaagtccatgccattcccagggcattctctatgccttatgcttgtggatcaaactataagctcccagatactgcttcagtgtcatgcctggttgccttctgctatgctccttgccatgatgatcatagactctaaccatttaaaactgtaagcccccaatacattcttctttaagttgcccaggccagggtgtatcttcacagcaacagaaaagcaacccagacaccctgtctcagaaaataaggtggaaagcagtacaggaagacacatgatgctaccttctggcttccatatagacaagcacaggcatgcacaccccgcccaccacccatacatagaaaacacacacatgcaaaacaaagaaaacagaaattcttgtcatcaggaatgacacatggcctgacttaacttgttggaattactgagacaggcagcccttccctcaccaactgagacagacacaaaagacaatgccaggaaggtcaaccatgccatcccgactagaaaggaatatgactaagcctctaccatttctatttcattttgttttatctaatttcaataactaactgttctgttgctgtgtttacatttgtatgtcccctaagcaccgtctgtgcaatgatttctccttcgcactcacacctcccttgccattttcacctgtccccatttcctcctcacttcactaaataattactgacacccttggccctcaaaagctatagaccacataccccatcagtaccctggtgccacaggctctgtctgaatcatgtctggtacacaagtccagtccacaaatgtcttctgctgcaagttaacacccaaatcgttcagactgctatttcaggcaactcccctttttaaagaactgagaaggccgtacgacccagttatacacttttgggcaaacacccagagaactctcagtcccaccacaaagacctgtgcacattaatgtttacaccgtgctattcatagtatctagaaaagggaaccagcctagatgaccatctatgaaagggtaaagagaaagtggtacataaacctaatagaattttatgcagtcttaaagacaaaggaaagcacttcacaggaaaatggatggaactgaggtttcctcttcccagctgactctaggttgtgacaactggacaaaacccaaacagtacagtgaactacagggctttagttttcttttaaaaataggaaaaattagggggctcacagtgttcgttctctcatctgtaaacagacaggaactgagagaatattcattagaaaaggcaccaaggttcgacctgctggtgacacccatgccctgggtcaggactcccggatctctcttaggggttcatgctcgggcttcaccatgggctgtgcaacctggagccccctagcttttctaaaccacagcttaggggcaggtgcatgtctgtgatgatgatgtctctaaggcagtgacatgtgcaagtcaaatcagacaagagacagacacactggcaggcagctgctctgaggagaaaaggactccgaagaggaggatgcagcttaactaagcagcactggggaatcatctcatagcactcactctaacattttcaaggatgcaagagcacctcttgtcagctcccccaaattcagacttgttttcacctgagagaatgcactgcccaagaaaacacttgatgagagaagaatagttccatagcagtttatttgtgggttgttttttgcttttattgaggcggtgttgctacgacagccctgtgtgttagttagggttcctaccgctgtgaagagacaaaatgataatggcaacacttatataggggaacatttaactgagatggcttacagttttcgagggttaatctgttattatcacggcagggagcatggccacatgtaggcagacggtgctggagtagtagctgagagtcctacatcttgcaggcaacaggaagtcagctgagacacaggtcatcactgtgcttaggataccacctcagagcccacccccgaagtgacacatttcctccaacaaggccatccccactccaacaaagccacatctcctgatagtgccactctctgtgggatccaattacattcaaactacctcacccaggctggccttaagtttgcaatccccctgcctcagtcacctggtgctgggatttcaggcataaaccaccatgcctggctgggtaatactctaacatggatgtgtaaactaatcagaatagcagtggttctcagcatttggatggaaaattccacaaaatatacacggtctaccctgcactttggcatacagagagctggcaaacagaatggacaagtcatatggtttacaggtgactagaatggctgaccctctcctgtttgcctgtgtcctctaccttttgccaaagctactttaataatattgcaatgagggttcctgttacaccactccttccatctgagggcatttgccatgtgttctttctttcctcacatgtaaagtgggacgggcactcggggcttaagttatcctagcctggattgtacaggggctggctgaattctacatgcacaacagacaaaactcaggactgaaaataacacctactcaggcaggaaagtgctctaagagtgtacaccatagaggagcaactgtttagagaaagcacccatgagaattgagagtaaccacccaggctctcttctggagagcccatccagagaacaggctagaagcattcacaacaagagcttgttgtacgtacaagaacatttttccagaaaccctactcacaaggcccaaactctctttccaattcccagaaactgggttctttgtcctgaaagccatatctttgccaggcttggtggtgcagatctgtcatcccaactacttgggatgccaaggcaagctcagagccttcctgggttagagtagcctcaaagacaggcttaaagagccccccctcacatacacacacacacacacacacacacacacacacacacacacacacacacacacacagagtgagagcaagagagagagagagagagagagagagagagagagagagagagagagactggagatgcagtagttcagtgatagggcacttgtacttgtctagcatgtccaactttgtatctcagtgacatgctaacatggagcacccaaatcaaacttctctaaaacacaggcatttgaaagctcagattcaaccaagtcaaccatagaagtacaggggcctccatttctccaggatctccctccccaagtatttctcccaaagttcttctgacctcatcttgtagaggactcaaagtgagctccaggggcacattgaactattgggatgaggggaatagttgatgtgattctcagaaaacaatcacataactgaaagagtcccaccctacccacccatctgaatttcctaaagcccagacaacaggataggacttgggacctgacgtggtgggcagtcactgatttgaaactcagatatgtgggttgtccatgttatagatagagtggggataaagcctggcttttccaccttaagtccctcacattactcagcttttcaaaaatatttcagtcaagaaagtgagcatttacactcattttgatgcatacctggagcactaagggagtctgaagggtgaacatcatgagttcaaggccagactgggcttcatagtaaggccttgtctcaaaaaaaaaaaaaaagaaaaagaaaacaataaaatgtaagattatttattttcctaaaaatattactgtgccaggaacccctaaatttctcccttcagaatatatcattatgtgacattgtctagttatggttcctaatgctgtgatgaaacaccatgacaaaaaccaagttgtagacaaaagggtttatttggcttacacttgaacattgtagtccatcattggaggaagccaggacaggaactcaaatagggtttgaacctagagacaggtcatgggagggtgctgcttattagcttgctcagcctactttcttacagaacccagaaccaccaacccaaggatgaccccacccataatgggctggaccctcccccaccaatcactaattaagaaaatgccctactgtctgaaaggagggaacctcaattgagaatattctttcataagattcagttgtaattaagtctatagggcattttcttaattagtgattgatgagagagggtccagcccattgtgggtagtgccagccctgggctggtggtcctgggagctacaagaaagcagcctgaacaagccatgtaagcagcaccccttcttggcctctgtatcagctcctgcctccaggttcctgccttgtttgagttcctatgtaccgtctttggtttagaactgacatgggagtgtaagcaaaataaatcctttcctccccgagttgcttttggtcatggtgtttcatcataacaatagcaaccctctcaagaaaagacacttgtcaaaaaaagtataagagttgtaccttagattctcaatataaattagcatgtataacataactaactataaagcaagatagggccaattatttggaaataagagcaacacttctcatactcctgtcccagtgtctcactgctacttgacatcttcattgcttttctgtgggtagctcactgtcatcagtaagatgtttatattccaggaaaccttcctctgctacccctcccactcttaaatcgctttcctcaagttgagaaagggagagccaccatggaaagcatcagctgacatctgtatgaggatgctctctttcctccagccaggtcctatttcttcctggtccacattccacaagatgctcccatatcttgaattggtcatggccacttcttcatgtaggtcaccatccacatggctgctcctctttctagaccaagaattctactggctaaaatggtcacaaaatttatgcagtatttgtctgggcattagccttctggatataatctttttgttggttgtaagttgttaaactggtggcattttgtctaaccaattcctactatagttctggaagattctggatgagaacagtgatcagcaggaagtattgtggagtatctttctgagaatgttgaggggtttagcaacacagattacaacagacaacttgcttctgcctccccaggatccatttttttttgtaaaagcacttcagttttccctcaggaatcatctcttccttttcattaatccacacatattaggagagaataacattaccatccagagagaacaggacccagaaatagtcccaagaatgcactagtcagcaactggaaatgcaattctaacagaattaaaaccaaacaaattcggctagagaacagaatacaaaggcaatgtctccagagaaggaagatgtagtcgagctttcttttcagtcaccagtccctaataatgacatggagacgtatattaattatgaaagcttggccttagccttaggcttttacccaggtagctcttaaaatttaaattaacctgttttttaaaaaattaacttacattctgtcacatggttcagttacctctcctctttatcgtatgtccaacctcttctgtgtctagctggcatctcttgagtacgtagattcatctcaagttcctctctctgcttagaagtcctgtctattttctcctgcttagctattggctatttaactctttattaggccaatcacagtgacacatcatcacacagtgtaaatcaaaattctataacatttctcccttttgtctaaataaaaagaaaagagtttaacacagtaaaaccatacataataagaacaattatcaagtaagaattacattcacgatgcttagctcatttccacttggcaatttcagagaaaatactcctatcttagtgagcccaaagttatgtacccaatttacttcttgtcataacttgtatcatcaatctaaaaatatgtttttagaccttaaaacatttccttagattaaacaacttaaacttttatgtctctcaactttatacattttacatctcttttgtaagttttttttttaattggtaacaagaaacgctataaaactatagctatctattcttcaaactattcagagacccaagaaagatatattacctgagaaaacaggaagtatagagcaaacaactctcaaaactataaaaacaacagagccatctgactgcctggtcagctctgctgcaatgttggggcatccatcttcagcctaaaggcttagaatatctgacagacttttctgtgaaacaggaattttattttattttattttattggtttttcgagacagggtttctatgtatagctttggagcctatcctgaaacaggaattttgaaggattgtcctaccctgtcttgacaaagttcagaagttgctttgtgtcctgcttgtccaattaggacagcatactgttagcagttgaggcaagggcagtttcttgcccagtgtctaactttgccacaatggaagcaactccatatggaggttcttcaatgcccatcctgttttgaagtaaattggttcttctaggaccagatgtagctcactgtcatgaaaagccttatgttgctaaaatatcttaaatgccatattttgtagatctctgaagtgtttgagggtcacctacctatctaaaatatatttctgtttaaccttgaaaacatacctaacatggccacaaatttgattgtcagataactaagtactatcctttatttcttaattatcctaaatagtttgtaataataactttcagggaatagaaatttacattacattattaaatgagttgcataggtacaatacctcaaacaagagttgaaacagatatacagtataacaaaaataatcttaaattttgtatcagtatacaaaaatccataccaatgtaaaatatttaaaattagtagttgctttttttttagtttaaaagtagattcaataatctacccttttatccttccattcccattttcttttcagaatgagatccctgaatctaacctcctttgcttagttttttccctgaccatgaccagtaacaacttataagcaacctccctaaacaatgacaaacatccataatccacagaatgaccaaaaatcacctatcccacccttgggaatgtgagtgctgtgctctctagactgcttcctattgtctgggggcaacggcacctttacggcacccaagaaaattgagataatggtcaagtcccgagagagctatctgttatccagtctctgtgtggaggcaaagcatagggctcatctgaagtcctggctggagtagtctgtgaggctggaccatctcagctagcagctttgttctagatgcagatgtctgaggaaactgcaagagacattctgagaggttagatcacctgggctactttctttctttaatggtgtcttgtcctttttccccctcaaaacacacaaacttttaaaggtaacatacatatctgaattagcacaatatagaatgtatggcgtacacaaatctgctctgtggttgaacaggttaaaggcatctgtcaactttataagtccatttggactgcataaccaaactgtaatataaagttccatccatgtcatatgaaaggattgtaataataagtcatgaggactctataagccaacaagatttatcatgtctcacccagtctcagagctgttcatgtagagggatcagcttatatatcaactgtcttgaagtttttctgttatgtctatagccaagattctcaggaggtctcctccagtcaaatctggtctttaacttcagggaggaaaattcatagctttttgtttactgtagaaacaaaagcacaacctctcccccaacacagtattttctgacttccattctaaagttaagaaattcttaaaatatacaggctggcttaattcagaagcttttttttttttcttctgcaatccaatatttctcagcaactgtcattttgttgttgttcattagcatttaaaaattttcaagtcaacaaagcaccatacaggctctagacaccttgtgtatttccaatttttatgtcgcttattcgttttacattattttactttctctctgactatctatactcattttcttttctttcttttggtacctacgcatattttcaaacatttttaaacctatttagagatttttttttttccagtctggacctgactttttgcatgcctgcagccttgcacttgcagtgttctctgatggcaagaaacaaatctttaaactgttaggctacaacctggagtggtgctggtggctggctccaccacccacctcccccaacccacccccacccccaggttctgtgagagcctagcctcatgctggaggacatcgacctcagaactacatttaccctccccagctctgggaagctgccgaatgaacctgctttctggaatcccagctgagcagcagccaactggtgaggggccaaggtggcaaatgcagcagctctggctgttgttgacttctctgtccattaggcaccaaatgttgtcaaactttctttttgaccaccagccccaaataatgacacagagatttgtattaagtatgaaagtttggccttagtgtaggcttttccccaactagctcttacaacgtaatttaacctgcttttattagtctacattctgccacgtggcttggttaccacctctataccatatgtccgacttcttcagtgtctctggcatctctcgaatgcctagattaacctagagttcctctctgtcaggaagtcctgcctgttctctcctgcctaactactggtcattcagctctttattaaaccaaccagtgatacatcttcacacagtgtaaacaaatactctgcaacagggagaaaacagtgaagaaagcagagctaagaataggagagagtgacttacgaagacgtttgaatcctggaatcagctattcctgaagctaaatgtctgagtgaatttcttagatagaattcacaagtctgagtcagtttgttgatttctttggcaactgtattctatccagcttcaaagtctgacaattcaagttaactcccatagtcctctgtcaaggtacttctggatgcaagacagtcaagtgcctagtctaccatccatgaagaagtcagcttaacttactatgcctagtatgtgccagctcagctcatcatgcctggtatgctcacgaaatatgagtgcttggacttcatcacatttcagaatggagaactagattttgttcatatcctagtgagcaaaatgaggctcaaatggactttgtaacttgctcaaaggtaggactcagctattagacccaacctgacactcgggcttgtctgagtttttctacaacatgttccatgcagtaccagactggctacagattatatacagacatatgcaatctcagaattacacacagtttcctttcttggtgggaatggctgttccttacagctctatctggcaacatgaacagggaggtctgggactggcagctctgactcagctagggctttcattctgccctcactgtctaaacacagagaacttcaccgggatgcctgtaggccttgtcaccttgtcatggggcagtctgacctcaagctttgtgcaggtgccatggattgtatccggtctgttaactgagcacatccaaggactagatgtaaagataagccctgtgactctcgttgacagtaacctgttagatgaagaaaaactattttgatattttgaatctacactgagaactgaagccccccccccaaaaaaaaatcccaatctcaggatattgctcaataaatgctctgaatactcgtgtggaatgaggtagatgctccagaagaaactaagggtccgaaggattaagccagcctaatctcaggaatcaaaaggcttctctcaaaatgacctttaaaaaaggtttaaaaacgatgaggtgacaagtcaccccgaatattacatgcacacccagtaatcaatactgttagttaatcaaggcgagacaattaccagcatgatggatactaagtaaggggtctagggcacctgtgaaaacagggagaagagggtatacaggagtcagggccttccccaggaactgctaagactggggagactcaaaaggaaaggggaaggatgtggcttaaatttctaggccttctgagagtcatcaaacaacacattaaagtatagccacactccacatctctaagacttcatagttttccttgattggtggccagacattgaattctttgacaaccagcgtctttacaaacccagcgaacactctcactcacatggtttccaaggcttttaacaattaagtcagaaagcatttattttgctttctgggcatttaaatattttttgctctttgtagtctgccaccagtaatttccccctggtttcctgcaaacatcctcatagcttataaatcctagacacgaagccttcattgcctagcatattaaaacagcagtgacccacagagctcaagactgagggaaacaagtgtctggggaagaagttccagaaactaaacagcctcaagctgcttgtcataacttaagttggagcccttcacatagcacagtcattctcccatgtagactaaagaagagtttaaggatggccgggcacacccagacacagcagcaagaaacagtactgtccctactccaagaagagcagcaggcatgctgacactctgtcctagcattggtgatctggcactcaagacaacagacacatgagatcaccatgtgcctcattagtaccttcatatttaaaatggcatctaccctggtcagtttgagtatatcatttcccccaaaatgcagcagagaaaaactaacaatccaaccaatcataataatttttgaatgcaaggttctttaaagggttggagattgtggggagagggatagagttaagtcctgagcaatcatcagaaccgcctaggatgttttcaaaccaagtacagtcaggacctgcctgtcctccaggttgggtcagactgtcttgacaggtagaagctaaacatgacaaggacctagagtagtcctacacccagcgtcctgacaaaatgacaacttctgcttgagccatgatgtggcttgatctgttagatgtcaaatattgataaatcattcctctcaaatgacgtcttagttgtggccaacaaaagtaaataaaggcctggcctgcttctgaccttcccactgatagtcacttctgaagtgcaggctagtgccacctgaatgtggaactctaagtcctggttacttgtcattatttggatgggtgaaaaataatggagacatgagttgggctcgtagaccatagagcagaatccccattcttcagacccactgaaaccacacgctaaatacacaagtctccaacacagaggcaactccatgtcttctcacatccttgattgaagcccagtaaatccacttattcagcctaccctgcccccttggcagctggataaagccattcttactatatacattgccaaaactccagagtcatctctccagcactttagttttcccgtctaccttctgcaatttgtaaagagcagtgtgctgcatagctggacagttatgcatcaacttaacaaagaacagggtcatctaagaggaaactcccagtgagaaaatctcttaggctgacctgtaggcaagtgtgtggggcattttctagactaatgattgaaaagagggccagttcactgtgagagggatcacccatggataggtggtttggaatcctataaaggaagcaggcccagcaagccagtaagcaacactcccccatgatctgtccttcaggttcctgcttgaattcgggccctgacttcatgatggatgcatgcccttcatgtgactgggccatgtaagtcaaaacaaacaaaaacccctttctcccgagctgctgcttttggttgtggtgttttatcacagcaacagaaaccaaaacaggataggccaagacagaaagccaaattcccacatcagatctgcccaaacagaactcaaacacagaactaagcatttactaaacaaccctgatgagtagatagaccaaggagcaaagccaagctagaccagggcagactgcaggagcccaaaggtccccagactacagctgacctcctgcctacagaatggtttgtttgtttgtttgtttgttttgagaaactttaaatggttgtttaactaaatattgcatttgtggggatgcagtcttgtaatcacagtattttggaaactgaggcactgcaagtttggactatttactaagaccatgtccaaatggggtggggtgtgggggggagacaatgaaaatcgaatccaccctttgttttcagtattatcttcaccactgctcccatttgtcccatctgcagaagcagctgtagcagaggactggaactcatcagacacccctgtgtttatagacagacatgtcctctctactgcttgtgacaatcggctggggctctgacctgctccctgatactggccatcagtaccatttccaaagcatacatatgatagaacagaaggcccctatcagacaaaacccagcaggtccaaagcaatagggccacttagttctgtttgggcaggtctgatataaaacaacagaggcctcaaatatacagtagacaagattctagtatgaccaatcaaactaattgagacagtgccataagcgcctaacctgaagacaggaggagtgcccaggtgggactgctacaccacagactgtttcaaagtactgttttctcttggtgtcccaagaggcagtcaagtcagattcagcttcaatgtcaaaaatttgatacagccttgctagcctgaagatggaggggtcaaatgaaagggaatgctggcagactccacaggtttacgttgttggcagcaaagaaacagacttcagtcatgcaccctgaaatctgcaccttcttttccccggagcctctgaatgagagccaaccttgagacaaccttgtgagatgtcatttagagatgctacccacccctgccacacttctgacctaccaactctgggatggtgtgcactgttttaaactggtaggcaccgacagaacacaactataacgtggaaagctctggacttagggcctcatccagaacttcaagatcagctctccagctccgcatcttcagtcagcagcaaacgacactgctctttcacgaaaaggaaagggttcccgaggaagatgagtgaggcaaaggccaccatgaccccaaagccagccccagcagggagaacactgctggttctgtatcctgtacatgacatgtatagaatctattgattgtcaggggaatctgccatggttctgggaccctgcacattttcttccgtctctgcctaagtcccttttcaaaacccatgtttgcagtaagcagccttgaggtgaaaaagtctttccagtggaacaaagaacagacttactatagaaaggaggcatcatcctcagcatccatgttccctgcttatgatgcaaattttactgtatggcacctaccggagcccctcccttccacggcacgacttggcagtaggagacatcagtttaaatatgtttatgctgcctgctatgctacaaagctcttgtgtctctgagccaggactttgatagctaggactcttgctagcatccatgaaacaggaatattagtttacaagcaggtaaaatcccagattctagctgttacatctttaagccaggagacctaatgtttttgcattctaaacatcaaagaaacaaaacatccatttgaattttcttatcgaaaaaataatttacactacagtgctattagaagaataaaaacaaaatttatgccatacccgggatacagaaagcatctaaagacaccctgaaaccgccctccccatcccaaccaccagtcagtccctcacaaacacaatttaccatattaggttatagcaggtgcccatgctacaactcattcatgaacaagagatataacaaaagcccctggcattctcacagtttgtcatgatgaacggagagagggcttttacacacacacacacacacacacacacacacacacacacacacacacaaacacacacacatacacacacactctgccacattaatccccgcacataaccacagtccaaagacacagatgtgctcccaggacactgttctagcagcatggccacttcttgagggcccctcctccaggcgagttgggaagctcacagtttgggcttccaaggaatgtcactgtcactggcgaaacagctggaagtcacatggtagaaaccgacttttatttacacatcagtattttcagtggacaattagttaataaagtccttaatgttatgaggctgtcctgtcctggatggacagacacatctggacttggttggtccccttggtccttggctgcttctgcttcatccatacacaatggatcctcatgttatgacagcatcacttgagggtcttgctgagattagagaagccaacaccaacgcaggtcatcagcaccttgtccccacccttgagttcttcaccacacggcttggtttcaattttaaacataacctggaaaaagctcttcaaatgccgtaaaaattctatcctaaaagaaaataatggaaacagtcattttaaaagaaactctgccctcttaaaacccaagactttaatttttgagattaaagactaaaattaaaaatgtctaatcaaaactgcttaagtaatatttatagcctgtcagtttcccaagaggactggaacagcctgcagagacacacacaacccagcgaggtaagtttggctggaaacagactggaggttgtgagacacacagccacacacttgttagagggaagacataaacatggagggaactgagtggtccagacaatgcttacctctatgagtcagcatcacagggtaaaaaagatgaacaaagactatttctgagacaactccagcaactgccttccacttaggaacagtatttcctgagtgtctctattagatacaggcactgttactagggacactgcagtcaaatgaaaggatgaacaaaggcgtgctagtatgttcagtagtcttaatttaaagaaagtaatagagaaggagaagggaggctaggggtgtggcttggtggtagagcccttgcctagcagagaagaactgcatttgtgcatatttagccagagacaatggtaaatacaacaccagggagccactcacagtgaacactgaaagattcattaggctgtttcttaccatttcctgtaaaagaaataatggcattcctgccaaggggacctgaggcagcaattcttcaggtgggctgcaaagcagcatcagggcctcaaataacaaccctggtaagctcagtatgaccctagtctgaccaggcggctcactggaagcattcactaaacacataagttcctaagggtggaagtatcctcctgggaaaccctagaatcaaggcgcatgcaagctcatgctctcctttttcctacactctgctgtcagagcaaaggggctactaccacaagcatccccagggggtctcaccaagcaagttgaagaaacatcattaagcgaagaaccctgttgtgtttaactgcaataaagcagacagacacagacaccaaggtgtgttgcttcctgacccagcccacctcccttccagccacagttttacgcctaaagcacacatggatcgcctgaggaactttcaaataccctgattctggacatgcacatgggtgaaacagaactgagggtcaagaaagaaacccgtatattatttggccacgttaacagcttgatgaggaaagaattacacaaatgacaggggaataactgattactcacaagcaaagaatggaggaatcagacctttctcccatcacacacaaaaatgaactcaaacacttcaaagaccttggaaagacttgaaactatagggtgaacttcattacttttggatgctgaacagtttcttaagagttcttaaaagaaacagaaacacccaaattccagcagtaagagaaaatataaagaattcttacaacaatttaggaaaacaattagaaaaaacagtcaagagatccaaggggaatcttctcaaagaagacacacgagtgaccagcaagcacgtgaaaagcggctctgcatcatctgctgtgagggaaatgaaaaggcaaaaccgctccaagagaccacttcatgctcaactggatggcggcactgagaaagccacccagaaacaagtgtggtgggaggcagggaacgaggaactttacacgccctgacagcaatataaagtaccactgcttggaaaacaatcagcccttcaaacgcaagcaaggagtcaaaagtatgatctataactctagatacatgcccgagagaagagaaaacatacagcctagaaaaacatctgcacaaccatacatttgtaacagcactgttcataagagtcaaaaggaaggcacgacccaaacgtccacccactgatgaaatgataaatgtgtcaaatccaatggggtattacccagctttctaaagtgccacatgctacatacgtgctgcaaaatggacgagctttgcaaattgtgctaagtgaaagttggtcactaagtaccacatattatatgactcatttttcatgaaatgattgtagtggcatcctgccttgctagtgaacttgtagcagtggccacaccctttggcgtggtttcaggtgcagacgtgacccctttaagtaggagaggagctggagcacactctcttgggttgaggagagcatcggaagagcagagactgtatcttctggagcaggaaaacctgggtggttatttactcttatctgtaagtccttatctaacaaacacctacttatcatttatcttaggtctggtgaactcattttgaacccccaccttcaaatggtcacaataagaactcttactacagggcttggtggcacacgtctctaatcccagcgctcagcaggcagaggcaagcgggtctctaagatggatagcctggtctacaaatgagagtttcagcacagccaggactaaacagagaaaccctgtcatgaaaaaacaaagcaacaagaacaaactattactgagacagagagctgggagagtggggagaacaggcagagaccacaaatggacacaggctttctttccgggtgataaaaatgttctaaaattggactatagttattcaactctatgaacatactaataactgttaaactgtacactgtaaatgggtaaactgtaaggccatgtaaattatacttagatatggctgtttaaataaatacatacttatgagttttaacaaatgtagtgattctggttcccatccctagtcaattatgcatgaaactaagactaaagtttgcctcggtgaagagggtgaggagtgtgcttcccctgtgtttctgatccaatcacaggacgggaaagattcggagactaaagggtggctgatgaactcacccgtctgagctgcctggcatgttccaagaaaggaaccaaccactaagctacctggtagtgaagggaccagctcccctttcggcagccataatggccgaacacgtgcttgtctgaccttgtcctagacactagaaagtcagacgcctgcctcgtgacaaggaaccaatcagaagttagctggtggtgctatcctttacgaccctgggtgtgctttactacaagcacacagcaatgacgcacagagcatagcaaccaccctgggagggcctatggaccataacaaccagttgaccaatcaacacaggcaagccctccaagcctgggggtacaccaatcgtgagcctgtgcgtacccctagacacaccccttacgctgccctacaagatctctcgggaggccctagttgttgtcttttgcaagcatccgccatggcgggtgggtgaaagacccgagctaacatggggttagctcattaaaaaaaccaataaagcttcatgcagtttgcagcaaactctcctcgaatccacctggtgattggggtgaccgcagttgtggcctgggaccctggataccttagttttccgggggtctaacagtagaaccagatctcagcagagatctacttcgctgtccctccatttatgaacacgcgccttcatctttacaatacaagcccatttttaaactccgccatgaaggctttctcagcatcgacacccgtccacgtgcctcttccctctctggtgggcgtcaacattctctgcctggggactacttaagttattgccacaactgtgctgacaccctgcctgtcatctatgcatctcagcagtgatggcctatgcacacaacactccctccctgctactgaaggctcacagtaacaaggcaccaaaaagaactgaggtattgagggtaactgagcaatgatgtctacattcttggtaattatgggaagttacttctccccctgctggctttctggtcttactgaccatgggaaacctttttttttttctcttttttttctttttccttttcatcttagggaacaaaaaaaacaaagacatgaagtccacagataaacaagccccatctgtggccaagcttctagctggccacagcacagaaaacaccaggacctcacccctcgtctgtacactgaggggaagacggtctgtctcctcactgctgcagtgtacacacaggcctgaggcgagcatccctctgggcctcacccagttacttcactctgaatcattcaactgtgctctaaaaaccagacaccctcccgagctggcagaattcctggggacttcagcttgcttggtgtcttggaggctgggagagatgcagaactgtgtgggcctatgtgtatgcagccctaagggatttgtagcatttggaacagttaagaaaagcaaaggctgtttggactttctacaaggtgtcctgccaacctctcaagctttaggagaagagctgcaacagatgggattgaggcttatatcagaatgcccttctctcacctccagcctcctccctacatcttcagtagctgggatattaaaaagcaaaagagaagttgaaaaatgatcagggaatcagctgttgttaaatcaaaagaaacagcttcattaagaaaggggaaactaaggctgggcggtggtcgagaacgcctttagttccagcactcaggaggcagaggcaggcaaatcttcatgagtttgagttcagcctggtctacagagcgagtgccaggacaggctccaaagccacagagaaaccctgtcttgaaaaccaaaacaaaaaaaaaacaatagggggagtggagagaaagggagggaggagggagggagggagagagagaaagggaaggaaggaaagaaggaaggaaggaaggaaggaaggaaggaaggaaggaagggagggagggagggagggagggagggagggaaggagggagggaaaactgatccaagagcaaggggcagtttttcttttaggtaagtcacttggggcaactggagttttatgaaacttttgagtgaaggatcttaatatctccctgaatctgcaattattttttttttctttttccagaacaaaatgatccactgtcaaaacaaacaggacttttctacgaaagcctccagtctatctgacaagcaggtttcagagaattttggaagcagagataattgtctctgtagattccaaagctcagttgttcccactgccactgtcaacaggtaaagaccacctgccgtcagaatcctgacaaccagaactagacaggctcagacacagcccctccaagtgccctgggccgtgatgggttagccactttctggtgacacaacagaaaatgctccttcctggtccaccagtccagcagggttcttcgtcacctggatgtgcgccagggtggctttagcaacatggtaggtgtaaggagttctccctagaggctgagggacaagacccaagagtaggaaagactgcttcccatggtcccctgcagtcagtacagcgcagctttggagattggtgctgtgcctgacgccaacaacattaaaactctactccaagaatgatgttaccaaactcgcttagagccaacaggaaacagaaccaggctggctgcactgctggcacacagggatccaggctgagtttagccaacactctccaaaagcaggcatcatcttattttactataatccaaacatctcctaaggttgaaatataaaaagtgtcaccaggccgggcattggtggcgcacgcctttaatcccagcacttgggaggcagaggtaggcggatctctttgagttcaaggccagcctggtctccagagcaaataccaggatagcctccaaaacacagagaaacctgtcttaaaaaaccaaaaaaaccccaacaacaacaaaaagaaagtgtgaccagacagtgcaacattcacagcacttcacaaatgtaaggcacgggacactgcaagtgctcccaaaaaccagcaaagccaatatctaggagactgtcacatgagtgtgcttggctgtgtgagccaaggagccttgagcagctgaggtttaaggcaaagacttttgtaccgcaccactcccatacctaaaggaaagaagtcattattaaggtttaaggagttgaagatgtcaagggtcacagcagacagagattaaagacctctgaaagctgcagcatgataattctgtaacagcaaagcactgagaagccagagacagtggacaggaccccagctcttacgtgagctcacagcagcacccccaacagaactgtcccagtcagaacctcacttgctttctgtatgaccttggcaaatgacatgtcttatcacctaagatgacgaacacaatagcacctactttttcactcatgcagggttctggtgaaaaccaaatgagttaaaagatgtaaaaaaaaaacacaaaaaacaaaaaacaaaaaacaacttcctgtttaacaagagagaaaccatgcctggtcctggaaacccatctatctacctatggctaatgaagtcatggatcttggaggagaactgagagccaccatagtccctaactacattttaaatacgtgtccctatactcagagataagtgtggtcctcacacatcaagaaaatttctctttgcaacagatggagaccattagagaaaaccataacccatcaaaatgcagagtttggagcccatcccaactgatagagatatgcctacaattcctgtacccaagcctcagggaacatcttggaagggggttggggtggaggaaagattttaagagccaagggatcagggagtttactgtaagattgtgtcttctaggaatgtcagaagctacacacatacatggagtctctccaacatgactgcctatccatgagctgcacaaggaaaacgacagacatgctaaagaggaaaagggggggaaagcccatcaggcctctcaactctatacaaagaactagaggtgactaaggaatgcggagaacaggagaaatagtcttccccagggaagagcacatctattggttatccaataccaaatggtcagccctgaaaacatacatacaagtaacattatacagattgagcagactacatttgtgtattaatgtgtgtatgtgtgcatacatggatggaggccatgaattgaaagagagcaaggaagggtacatgggagggtctcctgtcctgggagggacaggagaaggggaaatgatgtaaacaaatagtttttcaagaattatcagggggctgaggctgtctagctgggtgacagagcactgcttggctgaacagcatatggtgctgggtttgatctcgaggaccagaaacagaaaagaacaaaaacaagaagcaatcaaacaagtattctgctcccagtaaacacggtgtctgttaaacaaacgctacctacatgattctggggaagaataaataagaacatacagtctgtgaaggagtatgactagaaggcaatcgtaaatcttaaaagtaatagattcagatttattgatggttcaatagccaatacatagctgactttacttcctgtgctcaaggtggcaggatggggagaagggactaggatgagacgaggggtgtccaggcaggatctgagttcctcagatacgatgccatgaacgctgctcagtacctcaccaccccgacttcagtcactttccaccatccacattgtccacagaggttgagagatgctcaacgtcagcctccctggtggctccgggcacagacagaactggagtccacacaggctagaccccaaggcctacgcacaggtagaaaacccaaggctgccagctctgatcccgtcatgatttctgagcattctaagatacccgatgatatactgatacatgttcgttgatgttactccaacatttaaataaagtataatttcttcctaaactgtaaaattaaccttctggagcacagggtagaaatactgtcaccaagtggaagtcaacaatattcacgtttaaaagaaacagagattcccttcacatatcaacggcatccaatagtatttaatcatcctgaggaaaaactgtctggcctcaaaaagttcaaacatgtagacttttttcaagcatgtagactattttctcaaatagtacagaggggcagaaacagcaatgagagcagggcggggcaagggcaaggaggaacacagcacccctgacttcccagtgagggcctgaacacaagagagaaaacattcgttctgagctctggtacttaagtgctgctccctctagtcaaacacatgcaaactgccagaagagatagtcaagctttttttcaaaccaagactcttttttctgctttccttgagaaaagtgaggttcaaaaactttatttctgtgactttcatggcacaagaaaatgcacgtgatactcccccacccgcatgagtcatggagcctgccccattgacagatagatgcaatcatgcctgtgaggtgccatgtttcacaattcatcttcctgagatgctggagccttctgcaagattaaggacaaaagggtcccaatcacagacatgtctctgctgaactaactcctgcgcttgcttatatcaaaagtgcttggggcaggaggggtatgtgtgtggcggaaggggttcagtgtgtacttgcccaccctgcatgaagccacagaggagggagctcatgtccaagccccaggcccagctctccaagcacagaatgctcccatctggtctactcttgtaaagatccgctcagagcagactattgttttcccaggagctgcagtaattttaggtttctggaagaagaaaggaaacctaaaaggattatgtggtgaagggcatgctgaggagggaacagtcacatcctagccatctccagagaggctatagacatacaaggccccaaagccaaactgaaacactatccaaaacaactttttaaaaaggcatcaagaaaaaaaaaaaaaagataaaagcatatattccacgtttacatgatgttctgccaaggcccaagccctggaccacacacatttggagacagtggctcttgctgtctgtctctaggatggcccaggcctccactgccctggagcagaagctggacacagccctgaccagctaagaacccaatggccccagaatgctcacacaaccagtagctgctgcaggcaactctgatgggagacgaatcctgcacccggggcagtcccttcccacctcctctctgaatgccccagtgcgattctctttgagcaatgttgacaactgaagctggcaggccactcggattactcaactctaggtttcctgtcctgtgaaacactttatgcacattagcaggagataaagtgtggccccttcaggtcctgcttatcagtttcccccgctgctaacacagtacattattctctttcatcttctgttccaaaagactcccactgacaactcaaaaagtaaaagaatcgctttctagtttccagttcccaaagccccctctctcaacgtgatggcaccaccattcttcagttatcacagtactgtacctttcagatatacagcatcggtaccatgataaccgaaaaaggacagttcagtctcaaatctaccggtctcccaacccaatttacctctcctagctaccacacagctacctttaagtctgtaaatatgtaagtacatgtgcatatacacatgtacacatatacacacacacacaagcgtgcacacgcgcgcactaccaaacctgctcgctcatttattcctaactagaaatgcttccttcactttgagctctgtaagtcgcgtcttctggctaattattgttcttgggagtatgcaagtttttatacctcagtagttagtttctgctaatatccaaccgcccgaaatcaactctgtaacttcccaacattcctatgaatttactctcacagccagctagtaagttataccactggaaaaatagctcatttgccacagtaagaaagctagaggaagatgggattggaaaaacagcaagctatataaaagtttatctccagaatattaacaaaacataaagtacagacacaagaactgcccaatatatatctgacacagctcagataacacgaggacaacagctgtaatggaaagaagggaaggcccaaacccatgtgtgagtgagtataaacaaacaccaggccagcagtcacaactgctggctggctgaagatcaacacaagcaggcacacggctgtggtcacaggctacacactgcacactttgtcattctgtacaatcagaaagtcaaactgaacagaatcatgagggcaaatgaaaacagcttacgtgtaaggggagagtggtcccagaaggactttggaaacgtcctgctgtccaagcgtcatgagcagcagaactagactttggttggttgagtccacacatccgccctgtaaacacaaacaccccaatgattaatcataggacaaaccagaaaggggacccaacaagcagggagagaggaaggcagaaacactcagaatacaggaggctccagaacagtggaccaagttcaaacagcaacaaacagaacatgggcctcctgagaactgttctacaaccaacttgaggttaaactaatagctaacccaagtaatagctacaaacatgacaacacacaagaaatcaacattcccaagcatacatctagggaaaaaaaaagaaagaaagaaactctccctttctaactggggcaatggagggcgccatcttactgaataaaagaaagacatgcacatagtttgaggaccgggatagttgctcccaagggttaaaaggacgacctatgcttattgagtgtgtcacagagcagtcaaccacacacaaagggactatctttgagggcccctgcactcatcccagctgctctgaattggctccggatgctccttcccttttcccatgacttcacactgccaagggccacagccagaccacctgttcttacttctgagacattatctctccccaagattcccttccttttttcttccaaacatagccaaaacgattctctttaaactttgggacaactattggggttgcttcttttcttcattctttatttccaaccatgtcagctgagttgctatttaaatatgtatccttaaaacaagcctttattcctgattattctttctagggtaactgtaacaatgtcaacttacatacagtcttactgagaacaagcaggatgtcatgaactgtctacccatcttacatatctaaaatcatccagtttgggaccatggctcactgctgcccaaggctggacccttgagtacaacaggtaaccagccagagatgcttactgggtgtaactccttcctatttgaatgcatgcagggcaggcagtaaaccaactcccaagcacaaatagtcctcctcggctgtcactctcagcttagcagacctgaaaacccattcctctccttaagcacactttaggacaaaagctgcttttccatacaaaacaggaaatccaaagaacaaagctaattgtttcacagctcttgttcattttcccattgtcttctgtctgcttcctacaccgagttgctcttgccccatcctcagctgacttgtattaggtactggactgaggtcttaatgcaataaatatgtcaaggtccatgtaccgggcaccgtggagtggggtagggcgggctacaagatgtgaggacacagatgagggtgttacttgcccaacaacagaagcaggctttggggaacaggcatttgaaatggcctggaggcatagacaggccttggaaagaacagcagcacagtggaatggctcacagccaatgggaaagaggtcaggctgtagagagacacatgtaatctgggggtcgggagtggggcagtgtctgaggtggggctttctgaactgctcacaagtatcaattgtgttctgggaaggtaagaagccagcacagggctctgggtagacatgaagagatcaagtccaggttgagacagaaacagactgagagggaggctgaagaggctgtggagaggccctcccctttgaagacaaggagagcagctcccaggggcgtgtgaagtgaggtgaggcggaaaaagttcagggcagtggacaacacagcaggccagaaccagtagggcatggtaacccacaagcacaggagctgggtcagagactcacaaatctgatttttaaaaaagcaggttttatcatttacacgtcacaacacagacctacagagaattagtcaaaaaagcattaggtatttttatccttttaggaattaaagactagagacacacgaaattttcttaacaactgaaacaaagcaaactcggttgaggaacaataatggttttgaaaagatctcatttaaagataagaattcaatacctaatccagggtgtatgttttcctcctggaactggcaggccatgcttttacctcagggctcgagtctgctattaatgagatacgaaacccaaactccagctgtgcccatgggagcccactaaacttctctgaacacggtgtttttcattttcccatagtctactagaaagggacggaagtgtccccatagtcagagaaaggaccaatcagctcacaaagtcacggaaaagatctacacaagccaacaggaccttagagaccatactctttacccaacacaacatacaagcagaaaatttaataaaacttcatgaagtaactgttgaatcaatggcctcatcatttacccacaaacacctaatcaccacttacctttcaaaaccacccataaatctatcctcaaaaatgagctgatttggcaccaaacaccctgcaccagacctgggctacacaagactcctgacagaccacatgcagaggaggccctgacttcctgtctccactgctcccggcagcaagcacgggggctctgccgtgcttctcgggtacatcaggaggctctcctagcttgaattaggttagacacaaccacttaggaccagtgtttacttaattctgaaacagttccgcatccttgatcgcactatgagaaagctgacttttgttacatgaccactgagcaggtttccatgccaggcttgaatcaggggagtagcctgcagtgttaagcagtcctccactgaagggtcattccggggatcatatcagaatgtgctgtgctctcttagaaatgtattttccctcaccagcatcttagctccactcgaaatctccttactttttagtcacctcggctgtggcaaggccaagggtgtgctcacttatgtgcctattgcacctgtgctcaacagttggcggcaatgaagaatgcagttggcctgagctgcatcctacctacagaactgcagaagcgaaatgggtactgcctaaagtctctctttaacactgccttgttctcacactttccagagccttccatgctgtgacagcctgcccttccctaggcagtcttcaatcctctaaattacaccgtgaactctattcacatacaaatccagctttctacctggataaatctgaaggcgagtccttatcgccacataagaacatctggggggagggggtcgctacgagtgagtagtctcaggttaaacagatggctcggtggttaagaacacctgctactcttgcagagagcccggattcattgtagcacccgcacagtagctcactgccttgtgtgttccagggaatctgtcaacctcttctggcctctgcacatacatacatgcatgcatgcatctatgcatgcatgcaaaacactcatacacataaaataaaaaccgggagagagagagagagaacgctcctttcggtcaggtcagcctccatcttacttcacctgcctctgtgttttgttttaacctccactgcctttcctgattgctccgtttctctcctctgcctccattaaaacccatctgttctatgtgccaatagagctcgatctctgctcatggattaattcaatgaacccattaaaccagttaattctgaacacttgctgcacagcacaggttagctctttaagcttaagtgcttagaaaggaataaagaaggaaagacatccattgcttctccagattgctccttccctgcacgtgcagaggcaggggacttaccctgtagatttcttcaagcagcagctttgcacagtccctgcccaggtcctcaggaagcactgctgctccctggccctggggattagaggccagttcagcactcaggaaggtaccattggtagtctctgccaccagtgacagtccaaagcctggagacctagtgattcaaaggcagaccctgagtaagtaaaggcacacacggcagcatacaaagaagacggggatgtgttcttcattaaggaaacacagactactgaggcacacaaagcagaatcaaggcaagaggcaagttcgcacttccaattagtcccccagtccctactttctccctccctactctttacaaagactctcaatgtgtttataacaatcacggaatatgacgtcaacaaacttccaggtactgagtatgcaaagaacaccaggcctctacttgagccttgttgagaagttaccactgccttcattttacaaatgagaatatgctgagaataagcagcctgaaccatgtccactcagtcgaagacaaagataagtctcaaatgcaggccttacagattccagagtctatggacattctccagttcctattcgaccctgaactacagccaattcagaacttactacaaccctggacaccatctgacttcaaggctgagaaataccagatgtttcccgtaacgacaagtatgaaaccagaaagggtaaaaggagttccatctttgcacttttgtctggatacaacgctaaactgagaattcacttaactacagtcaatgagctggcacggtggtctctgccatgtttccaccatccttcagctaaatcctatcttcctgtccagggtcacagctgacttcctaacgtatcccacaagcaagcacctgagggaagcttccacagtcaggaaccggaagtatgctggattaaacacctgagagtctgctctcacaaaacacagtgacaaccaatttagccagaaagaaaataagtaaataaataaccagtccataaacaagaaaaagcacgtctccacaaatttgccagatttgatgcctcaaatatactttgtcaactgcaaagtaaatccatctctcgaaaagctttcccaatggcacattcctcacacactcccaacacagagctactgccttgaacactgctcaatgctgttctaaaatggtcttctatacccagaaccctggccaaaacagttccagaaaaactacaggcatacttatgatgcttatttcatttttatttttagagacattactgcaccactgaagctggcttcagctcccattcccattgtcttagcctgcaaggaggactgggatgatagacatgcacccccaaagctggctaatgacgttttctatgagctatagtgactccatatgtggacaaattctattgcccagtttttaacttagttaaaacgattatttagaaaaggataataccacctgccaaagtcaaggttccagaacactcatgtttaacaaacttcactcatcactagaggcacacagaaaattatactgcaacatacaagatgcctttaagtcacaagaagaaaactgtgcatctagcatggtggcaacatgcacatgacatcactgaggacatgcactgagagtctgcaatgcacagtccagcacggaaggactaccattacttctttttttaaaagtaatgactgtgtgagtcaaaatgcaccacactggaccaatgcgcatgctggtctaagtgctaacacaggccaagaagagctggctcccagggttccaggccttgagcaccacatgccacaacccttaatcaagtggatccatctctagatcagattggaggagtaatccatatgactacagtcatttattacccataacttgggggttaaaaactaaaactaaacacatgggtttagacatgatttttaaatggtgtttgaaactaatgaacatcatgtccatatcttgatctgtatgtacagctactcctcacagaatctgaccatataccaggtcagctgggtcaatggcactatgaaaagccgtactatcgctggtggcagacagcatggtttccaggcctgcgctgttcctttcctgcccattctggtaaagcagagatcagagaacgaactctcctggaacattctgcttctgctacgacatgcccttccccaacccgcaggaatcccctccagaaaagaaggggggcccataaattgcagacctacagctaaggtagaagaaggcagaaagaaaaagccaacattaggagtcaccactttcgtagcaagtactgcacgtactaacgatttatatacgtgctcttttaacttaatgtttacaattatcctgggatacaccattacattcaatgtgtaaatgaagaatgttctggtgattgagtaataaaagatatggaaaggtcaatgaccttactacctgcatcgggaaaggccaactctgtgtacccatcatttccagccctaacctctgacaccattactttctactgggctgtgtgaaggccagacttcactcacactcaaccaccccttcctcatcttcactcttagctcaggccaggagagaccctcaaacagctgtgaggaccagtcatgctgccccttagagaaaaagcaacttcttaacccaagtaggtaattgtaggacccgatgcttcattttcagagaaaaacctgaaaacttcagattcaaaccaatgagatgagaactgaagccaggaaggagtggtgcagtatagtattctcactagggcatctgttctagaacacactcacttcccagagttgatgcctttcatgtggtctgtgtaaatatagatgtcagggatgaacttgttgaggatgctcctggcagaatccacaatccggtttgccatctgaggagatacgcgcacagagtacctgcagcccagggttaaggaagtcaagattcttggatgacagaggggagaaaagccagttagaaagctagaaagcttgcgtcatgctgggacttacttacaattccattgtctctcaatgactattatttagccaattagttccattactcaattttttattataaaaaaatggttaaaacagtcctgatgaaaaagaacctagattcctataggaaagtataaagtcaagccagacagtcccacagcccaatcctgacttcccaactaccctttctctgtaactattcccccctctagagtgtgaagatgcctgcttcttcaaagccacagtcaggctccctgtgaagactgctatagcctgactgatatgagaagcccaagaatgtagagctgggtggggataacacacgcctttaatcccagagctcgggaggcagaggcaggcggatctctatgaatttgaggccagcctggtctacaaagctacaaaagaaaaagaatgtaaggccaggccagataccacactggggtagccctgggtcaatcccagcccacttcccaggatgccaacagagagacagggaagcagaaaattttgaccaaggggaccactatttgaaagatcgaaggttttccaaacacacagagctatgttcggtgaagaatcagtcattgcatttgtgaggacagagggtctacttgctactctggtgaaaacaactaccaacctctccaaggaactcctgaaatggagaaaaaatttgccagaattagcctgaggatgtggaacccataaccccaagttataaccgtgtaacagagtctccctgaccccacctcaaggtgcagtgaaccctcaagagctggaggtatacagatacagatacagatacagatacagatacagatacagatacagatacagatacagatacagatacagatacagatacaggactaagcagtgggaacaagaacgtgtggtcctcccaccaccacgataaaccatgtagactccagcatagtgtgatgtgcccattcctacaaagctgttcaataattactatcaataacacatttgatttcattagcactaaaaacaaatgctgtgcacggaccctggcctatcagctagcccatctcctcgtctgaacctgaacactgctaaagagcaaccttcctggatcctactgtccagacttgccggcctaccccagttcactcccacctggaaccactgcccacctccatccagtcagtcttcactcaactgccttccatcactcttcatttcacaaatgcctcctgcatgaagccctccagccagcacctgacttgaacttaccacggtttccttcagacccatcttgtctttgctccctgagggcaggggctttactgccgcacccctcataactgtccacagggtccttacgctgcacccctcacaactctctcaggggctttcctgatggaccctcacagctcttctcagggtttttacactgtcccttcacaactctctgaagctccacttttgtactcagaaaggctcaataaatatttgacttgactcaaaggacaactccgggatggggaaagagcaaaacagggattttaagatacacagcccagtttcatcaccatctcttctgttcagaatgtactttgaacagttttagacaaacagcctcgggtctcacagcctttggactgaatgagtgccatcttcctggaacctgagcctacccactcttcctaggacagctcaggagacgcccccaccatgagacaaccccacagcactcatggatccccaagttcttcacagacatatctgcttattttatgcttatgtcaagcatgttgcggggccttaagtcctggctctcggcttcctacagggtaagcccttgggatgcagaactgagacattttctcaaacaaacctgactacaaaaaaacaaaacaaacaaaccagcttcctcttaccttcatgagacaggaagctgtgtttgggtgtgcactgaatgtatacacatgtgtggtacatggtgtgtgtggaagcaaaacaaaccaaaagactcaaactagcttctctactgatgggaataaccccagactgtcccacaagtccccccaacacacccagctctcctgcctgtccccccaacccatccagctctcctgcttgtccctggcttctgcacctaactcctccacaatgaatactgagctctggatcagcagcgccttagcagatactggtctgcactttcaggggaaccaatctttatactcctcctcactttgtcttcactttccagttctgaaggcctctcggggttcaagtctcctctctgcattcttcatgactgctgactttaaagcattcacttccagccctcatcttgccccagagctacagatcctcaattccaatgtcctttctagactatttcactggagccatcaaattgagcattcctaattctacctgtggtagtttgactgtaatcggcctccataatctcatagggagtggcactattaggagatgtggctttgttggagtgcgcgtatggacttgttggaggaagtgtgtcactgtggaggtgggccttgaggtttccaatgctcagaacactgccaagtgtctcagttgacttcttgttgcctgtaagctgtagtactctcagccaccaccaggtgtgcctgcatgccatgctccccagcatgatgatatggacggaacctctgaaactgtaagccaaccacaccaattaaatgttttctttataagaggtgccgtggtcatggagtatcttcatagcaatgaaaatgctaagacaccactcgactcctcttttgtcgctactgtcagagcaagcatccctaccagcaagccttggtgagaagcatcaaaaccatccccaatgactcccaatcctcttccatgtgtgtgtcccataccctccctctactgcctctgtcactagcagctctcaccaatcctctgactaccaccttccctgcctctctgcagggcacaagaattgttaccgctgcctctaagtggctgccatgaggcagccatactttccaaatgttccacaaacgtttgtgcataagttctcctcctaatatgcaaatctgctttccagatgaaaaccactgacttttaaataaaggccaactgctcaaaacagccctcagttcttcgtgggctcctgctcaattcagaccccattgtgtcactgaccacctgagtcctgtcagcctgcattgctagccctccccaggaggctggtgtgccacttcctcagcaaaggcccacttttctcacggcaccgtcctcctgacttgtcctacttcacaagcctccgtccttaaagcctcagccaaatgcctcagcattgctccaggggaaaacagcagagggtaaagcctggagttactgacaaggtttaaatcccagttgtgccgattagctagctatatgacattattagcaaacagcttttatacctcagtttcccttatctaaagcctaacactgaggtgcacagttatcctcccccaaaggacacagaagaagcacttcacagcggaacatactgccacgattccagccccccaaacatcctgcagacaagtggcccctccctcgtcccggatcccacggccacagctcctaccccagcatcattttacatgttatactacaactccacagaattgtttccatcctcagagagtgtagcaggaagtgaagaaaaaagatgaatcaaccttgtcactgtgaggcacagaatgaataaaacagatctcaaccactacaatttcaccactgaaacttttatgagactgttgtctaaaatgcaaatagtggaaagaagcagagccgttctcttcacagggcaagaaaataattagatctgatgcaaaggatacgccattcctctgatacgcttgatttttcctgggtctgtgagctggacgggcttcaggaccttccttacagggcatgagaaaagcacttcgcctcctcctccaggaggcattccccgtcgcaagatctgcacaaaatggtaaggggaacacaggggttaaggcagacaacagaaaacacggctccctgacatcccaacccaggaaggttaaaccattcccaccaggctttgaagacatcacagattctcaggagcccctggacacaaattataccagggtgattcagacaagacaaataacgggccagactccaacagctatggtgtggtgggaaggttgccatacctgtaaagtgtttataacagcacctactagagttaagtatcacatgactgctgaccactattaccgatattaaagggtccctttcagttcagggtttgaagcatcagctaataagccctgtaaatcaccgtgatgtatgatgacctgaaatgtggcacgtgtctcttccaataagttaaataaaaaaacatcttagatgtatagagccagcagctcccacattcttaccttaagctcaaatgactctccatcaattccaaactgtttcaatagagggagtgctgttgccttaagaacatcaacctggaagttaattcaaagtagaatttttaattaaattttggacatgtagatagagtttgaagcaaacaagactcaagagactgctagactcgcacagaaaacaaactgtaacctctgttcattttcatcattttatttgtttcttaataaatactattattatagcattaatttattattcttttcccaatatatataacactatgtatattctttttagcacttagagctgctctctctccaggtcagagtaaaccaaagaactcacaaattataccagggtgattcagacaagagaggtaaagggccagactccaacagctgtggtgtggtgggaagggcgcaatacccgtaaagtgtttataacagcagctattacagagttaagtgtcacatgactgctgaccactatcaagaatcttgatacaggtgcccaatccacattctggggggcttagggggatgatgccctcaaagcatatgaggcactgaactcccaatggtgattacaaaagcactgacagtttgtggcaagattttgccgattattgttatctcttccatatccagagctcccggaccctggggaggctgaactaggagagaaagcaagggtggtagcttcgtgaggagaagagaccagaagccctggtcctggtcccaaactcaacccctgatggctcccttcaaaaataccccagcaatctaaacttccctccccaagacaggtgtcaagcctgtcaaaatgatgtagaagtagagatgacacagaaggcctaggagcccctcagaatggactgggtgtggtaggaacggatccagcaggaccattaaagatcagctaatgtcattaatcacatgtccctcaaccacgagatagtgtgcgccatctcttcaacttgccagcttccaaaagagaaaaagtttcaatgtaccagctgcctagtctcaggaactttgtgacagcaaagttcagtctgtatcagaaaaagatacagactctatcagggccagcttgtgccttccggtttccagctacacaccccaagagaatgagagttctttaagggaagaattaattactcctgacacccattcttacgcagagagcaccaccacggggaacacagaaaagaagatgactgaagatcccataggctgaagaagttactctttaattaagcactgtgctgatattttgtgtatggtctaacaaataaagcttgtctgaacatcacgcacttgccatagaggccaggcagtggtggcacacacctttaatcccagcactagggagacagaggaagacagatctctgtgcgttcaaggccaccctgggctactcgagactgaatctgtctaaaagagaaacagagctcacacaaccgtgaccccagcacttagtgtaacctgcctttaaccccagcactaaggaggtagagacaggaacgaatatggctggacggagagaggaatgtaaagtgggagacatgagagagatgaagtctaaggcagcagtctaaggagcagtgcagtctgaggatttgtagagacaggatggcccctttggtctggggactcagtagaggtaagaggtctctcttgtggctgctcctttacttctatgaccttttagcatttaccccaatatctgactctgagtttttattattaagacgtattagaacaaggcacttttgtgttaacttagtctagtcaggttaaacaaagtcattttagtcatagctggcaaacgtaaagcatcccctaactgtgagaacagatgtgctttaagcgcactgcatacgggaattcatcaacccatcgctgttactaaaacataaagtgttttttaaaaacgtttaaatcagtgctcatgagcattagcaaatatagaacgagcatgaactagagggcaaatgctgatccccaagcctgcatttaccattacttgagacacttcacctacctacaatctaaaggtgcaggcgcctcctctcctattttaacaaaaggaaccatttcctaggatctccagacaatgtggggagatggaacaagacgctctaatttaaaagtctaaacaagttacatagcattctttcacccacagctgaaaactgcgaatcttgcactgtacttggcctcctatgaagagtccatgtagctaaatgtccaagaactgaggaataagtcctcagctgcccaaaaacatattacataatgggaccatagtgggaaccttgctaagtatgagtggtcaccattaactgttccttcccagtcaggaaacttgcaacaccctgcagctaccctgtatctacagagaagataagatgtctcttcagtgatgactgcacggccaccagctgtccaaagccttttctagatactaaagtgtcctcacggagactccttccctccccacaggatgttaacacagacactggtaactacggtggacaaaatgaaaatttttgttgggtgttaaaccattttcctcctatctacaggaaaattaacatgcctaatgagaagcttgctgtgtcccacaactaccaacactcacactttccttgcctgtcctcatgcccactttgtcaaaaacttctttatgtgaagagtccttgagttaatggcggaggcctggacaggacaagattactctgtggcaatgcccagagataatatttcctgccgcttctaaccgtggcctgctgtcctcgaacctcagtgctcacgcgactccacccacactgcagccagcagggccacatttcatgtcaagcaggatgagacagccagcgtcagttctgaaggtttgtagattcaacagaaaaaggcacgttgacgaatgttagccagcatctccaacttgaagattgtgggtcttaactcacccatgtctcggagtgaattaacgaactctacgtctcaaggtaagtggcaaaagaaatgcatgtaaaaacaaaactatgctcataagaaactttttttttctaagaaatcggggctatgacaacagacaaaagaaaaatcacagtatggtttgacctaatactcaccgaagggtcaacttggtcattggtcactcctcgtagaatgatttttaatgggtgcttcataaacggagccagacaaagcagggcctccaggtaatagccaatgcttcggagaacactacagtcatgctccacagaccccccatacaggaggccaggctggtaatacaaggttgttccttaaaccaagagggagaaaaaaaaaaaaaaaaagtaaatgatacagcaggaacaaaattaagtatcaagacaacaaacgtagtgagatgagttccaaggggaatctgttcaagtcatccagggagctcaaaatgtcatttctcagagtccaaacctcatgtcaaaagctgactcaccaccaccaagcctctgaacagtaataagtggtggatacaatttagtaccactcatatagaaactcctccctgagctatgtaagtggaacgcagaaggctcctaacagttgctaagcttccttccagtacactcagatgctggctgtgggtctgtggaccaaaaggtcagcacaccagcagcctgcatcctgtagactcccctctctcatgcatcccacttaccaaacacttttgatacccacacaacccagattcttgtgatatcaaatatcatcagtggtagcattttaatttgctattagttagtaaaacatcaacttattttgtcagctgaccctcatcattatcctagttcagttttccacagattcatgcaatccaaaaatattcacactgcatttatcaggggaagcacagtcagaaaaagacagatgaacaactcattcccaggcctgttcttcattaggtgtggctgaatacagagacccaaacatctacctgtgactttaaagttgcattctttcttaagagagtcaacatactggaaaggttaaagaatcctttgtggaatgtaggtggacagttcatggttccaaccaatgtctgccctacttcctagtcaatgaagggaagaagaggctaaggctgaagggaatttcttaaaatatatttatataaacttgaatcaagtctttaaaataaataggtttcggtacctacaacaatacagtatacctgggtgtttgctgtaagaattcaacatggttgcacatgctaaattcagaacgtttacatatatgctaagtatatgaagaactgaatgctcccttttgtctgaaatgaccacttgtctgtttctctaaaccaagtgcatttcctgtctcttttcttccagtgttaaggattaaacctagggccttgagcaagctaggcacacactgtaccactaacctacagccttagttctgttacacagcttaaaaattgggagatttcatatatttatgcttgtatttggtatgattatgtgtgtacatatatgcatagtcataccataaacacactgggtctttccagttgaaagtactatagtaatgatccagcacaatgaactatcttacaatctccactcagcactgtcttgggttagtttcaaaaggtgttctccaaacactcatgctgatggcttagctaacacaaaagtcagtaaaatacataatacagtattaccacccaaataagaaagaggaatgcttgtgtagtacaagtaggtgctttcagaaacagagagaagcctacctgtttggttgatttcaattcgagaaccattagttattttgtccaacagccttataaagcttgcttcaaaatctgggaggagaaaaaaggtaaaatcgtccgtcaagcaccttttctaaaaagcacatgtcattcaggtcctgaaggagcctttgcttttaacatgtcatctggagttccctttggaactggctgacagatcagtcatgggctgagggacctgaggcagtgaaagagcactgatgagaacaattcaactctcacatctgacaacaacaacaaatacacacacacacacacacacacacacacacacacacacacacacacacacacacacacacacaccccacactctatctaataggaatgctaattttgcccacacagaacctataaaaaatcctggtgtggcagcacacaactttaacccttgcacttgagaggctaagacaagagaatctgagttcaagaccagcatgatatatacacccagtgagctctaaggcagcatagtgcctcaaaacaaacaagcaaaactacccgacctcaggaggacgcaccacaggtggtagtttggatgggaaatgtccctcatagtccacactctcagacttttgggtgcttgtgatcctgtttggaaagggttaagaggtgtggcctggttggaggagatacatcattggagacgggctttaagtgtttaaagacttgtggtgccgcttccagttcactttctctgcttccagcttagctgaaagtgtgagctgtcagctctccatcccagcctccatgtctgctgtatgctaccatgccccccatgatgacagactctcgtagatctggaaccattaagcccaaatactctaggttgcattggtcatggtttttgttttgttttgttttttaaatcaccgcagcagaaagtaattagtacgccaaacagaagaaacagcagaaagtgtgaaaactgaagttgtcctttctccagaacgtctaggaggagatgaagtagagatcaccttcaatttcacagatgaggaattccccctccccttctgatctgtaactatctggctagttcagttcgggtgtggaggctttgttgttgttttgtattgtattaaaggggtatttgagggtctggggggggtggctcagtaggtaaagtacacactatagcaataccagagttcaggtctgttttgtgcaaatggtaataacccacctgaaattccagagtgtgcaaggtggaaactggtcaccagagcaagccagctacaagagcggaaagcagtgagctctggagtcaaccaagagctctgcctctaactgtacataaggtgaggagagccagaagactcccattgccaacctttgacctttacatgcatacaaatgtatacccacataggcaaacacgcattgcaaaactaaataattctttaaaatcatactttaatataaaacattactaccatctattttaaaatgcatgaaaagaatattaatgaacagatttctattgataggagtaggtagaatttaattttctttaattcctttctaaatacatttttatgtatgtgtggctttgcctgcatgtatgtacaagtatcaagtacgtgatgggtgcccttggagccagaagcagatgtcacatcccctaaaactagagtgaaagacagttgtgagccaccatgtgggtgctcagaactaaaccccagtcagttctctgcaagagcagcaagtccccttaactgctgacagtctagcctcccaaatttgttttaatagatattatctaaaatctagtaacttgtcaaaagtcaggcatggtgggttcacacctgtagtcccagcacttgggaggctgaggcaggagggactgttgggaggttagagccagcagaggtacatagtgagttccaggcaagtcaactcctcagtgagaccaaacaaacagaacactagcaattctttaaaagagaaagggatgaagggaagagtggaagacaggagcatgaaaggggagcatgtcctctagcctatctccctgcctctccaaagctcatgtcttcagttacatcaggactgagtttacctctccacttaacacctcaaacccaagcccttctgatggggaaggtccttctgtatatatgtttctcttattggttgataaataaagcactgttggccaatagggaagcaagataggtggggctaggagaaagggaggattctgggaaatgtagtaaagaagaagtcgaaatgtgatcctggcaagagaggacgaatcccagtaagataagtctttataaaatatatagattaacggttatggttgaaacttaggacagttttagcaaatgagaaatcgtagtcattggccagcagcattgtaaataatataagactctgtgtgttatttgggggccctagcggggctcaggaggctggcggaaagagttcatccatacatccttcccctaggaaacctgaacttctttctctactatgcaaggaaggattctgcaagcagttgaatgaatggccctcaatcaacactccttttttgttgttgtttttgttttgtttttccaagacagaatttctctgtagctttggagcttgtcctggaactcgctctgtagaccaggcagagatagtcagatcactgtgagttcaagaccagcctggagtacacagtgagttcctgaacagccagggctacacagagaaactctgtctaaaaaaaaacaaaacaaacagaacaaacaatcaacactcctttttagtaagagcagtatggatcacagtagacccccaaccaagcagtgatttaagtttccagttattttctgttcacttgtttgttttttgtttttcaagacaaagtttctttgtgtagccccagctgtcctgaactcactctgtggaatagcctggccttgaactcaaactcccaaatgctgggattaaaggggtgtgccaccacgccagcttaattttccagttttaattgctaccaggcaggcctatggaatctgggaaaataaaggcactgctaccaaggctgaggacctgagtttgatctttgggccccacatgatggaagaagaggattgacaggttgtcttctgacctctacatgcacgcatacaaaataaattaaataaatgtttttttaaagattactaccagtcaatgacagtgaaaatattaaatagaaaggtctagaaataaacaattcttttcagttctcccaagatgtgaatcctacctttatccagcacattgaaatcatatattctacatacccactggtatcttaaatcttcctaggtgtcatagctccacagctgtggtaccacagcactttgttcaaggcttctttatcttacccaatgatgaccctaaagcacaagggcagtgatgctagcatcgtggccatgcttaggagaagcatacgcataccatttatgtatagagaaaaaaagtttcgcaaggaatggtggtgcatgctgacaatcctagaactagagcggctgggataggaggatcaagagttgaagttcagtgtggaaacaaagcaaataccaggccaccctgagctacacagtgagaccccgactaaaataaaaacaaaactgcaaaactagaagagttcaatgctatgtgccgtcaggcatcaacccggatggggggcttggtgggggacgggcatatcttagaagaaatgcctcaaggagaaagggtatagcaagggtattcaagaatctttagcttcagttttacacacacacacacacacacacacacacacacacacacacacacatatatgaagttcttttataagtagcattacaaaaacttgaaagtaactgaaggatggcattcattatttctatagaacattctatttctaaaaacaggcacaatttgtatgacaatgccactttctagttaggtttacaggaaatgcaaagtactctgaaagaagtaagcttttaatttgctcaagctttctagaagaggcatttgacaaatgaagcctaaaattaaagtcccatagatcttacagattaagaaagagaaggaaaaagtaaaatggaagggaggaagagagggagggactttaaaatcattttgttttgcaatccacgggtactcttaatcatgacctcagtcagaagccatcatttggcaggaacatgagtaggaagagaacagcaccttaaaagacctccaggcaggatcagcccgggtcactgcaaacatgcacttcagaaagccagactccagctagttccggagtcctcctaccagtgaaggtacagctccatcatctggtgcaaaagatcatctcaaatccatctaacaagtagagtcaattccccagcctcataagccgggaggcacatgagtgttacccatccagctccctacctggaatcttcccttctgggttactccttggtgtctaaaacttcagccagatgaaaaacttagggtagcgtttcaaaatcaagcacaatgctactgcactgtgttggaatacacaatgtaactcagatgtggctgccatcagacacagcagacggctgtgaatgtttaagtgcacagacgcagaaaagggtctacacttcttgacctgggtgggggtcacacaggttagggtacaatctctcaagcattgttttatgtcttaaagtatctcttgagttcttttaaatgttttaatttaaatttatcgtgtgtgtgtgtgtgtgtgtgtgtgtgtgtgtgtgtgtgtgtgtgtgtgttatatgtgtcatggtgtgtatgtgaacatcagagggcaattctcttgagtcagtatgtctacctttgtgagtattccagggataggacttgggtcaccaggcttgcaccagaaacacctttgcccaccagtcatcttgaaggcccagatttatactttaaaaacaagggtcatatacattcccatctgaggcaggaggaccaagactttaaggccaatctgagacacacagacaacccttgtctcaaaaaggaaaataaataaaagataaaaaagagctaagctgggcattggtggcgcacgcctttaatcccagaactcagaaggcaaaggcagtgggatctctgagttcgagaccagcctggtctacagagtgagctccagagaaaccctgtctcaaccaccaccctcctcccccacaaaaaggagctagtcccccaatcccccttttgtttttcttgagacagtgtgtgtgtgtgtgtgtgtgtgtgtgtgtgtgtgtgtgtgtgtgtgtacatacacacatacatgcatgcatgcatacatatcctagctgctatggaatttgctatgtagaccaggctggcctcacactcttaagatccacctgaaaggagcaaatttcaatgaactaactatccttaggagttaggttgagaggtattctaactcaattgtctacaaatagcaggctggctagctcacagcacatccacagcagaacactgcagccttggaatcaatgacacttttgatgtaatcaactagtatgagtcacctcaaatgtacaataagaaaaactgtgaaccacgaagatgactatgtaaaaacagtgtgtgtgtatgtgtgtgtgtgtgtgtgtgtgtgtgtgagagagagagagagagagagagagagagagagagagagagagtgacagagagagcacgcatttatgaaaacaaaaaaacacagagcctggaagacacaaattagcaacactggctgtttcggagtggagactagaagacagactctaaacttttttttctctctaaactctgaaccatgcacataatttcacataaaatccacatacttttccacacactttaaaagttaaagaatgatttcagcaaattctgtaatactatacagttgtcaagaatgttttaaagcctgacctgcagggtataattgtaatctcagaactcaaaaggctgaggcaggaagaaatgagttccaagtcagcatgggctacacagtaaaagcatttctcaaaaaaagaaggaagagaaaaaataaggcttaaaggaattattcaattgcacaaagaaatgctcacactatattaaaagaagggctaaaaggatcatagtcaatgtgatttcaagttctttagaaaataacaggaaagcaagacaataaatggttaagttagtgtcatgtttccccattaagttccaaaggcagaaattatacacatccaattctcagttaagagatgtcctgtccaataaaaaaagagagagagatgtccaatcatttcaaaaaatattgccttatataacattttataatttctagacctgtataattcttaaagaaacatgacgttttttcctagattgtgatcagaggaaaagctatacagaacacaataaaatatcttcaatagaaacacaaatcatgaaagtatatgggaggtttactaaagcaaatgtcaccactctaaacttttatgaattagaaggaaaaagggggaaaaaaaaaaggacacaggtggtgcacgcctttaatcccaccactcgggaggcagagccaggtggatctctgtgagttcaagcccagcctgctctacaagagctagttccaggacagcttccaaagtcacagagaagccctgtctcgaaaaactaaaaaaaataaacagatgaactgagagcttaggaacagtaaagaaaatctagcagtaaaagtctggaaggctgcctgggaaatggaggtgttctgtagtctaggaattaaagcacacaaactattccaattatttaaaattttgaacaacaatagtttccccaaagaaatattacttttataacataaagatgaaagtacgttttgtctcatacatgcaaattttgtgtgtattatggttttcttatatgaaaaccaaagaaataaaataaaaaccagataagtaagataaaaggaaagaaataaaaccaacaacactaatactgaggatccaaactcatgttctcatgcttgcaagcacatcatcaactaagctagctccaagctcccctaggattaagaacttctgcaataagctagtctctattattacatttataatgaagccagcccaaaacaaagcagaagacacaaaaagatccaaaacaaagagaatgagaaaatgtattactatcgaagaacagtggtgaaggccttggaaacttcaacagtcaaaaaaagtcaaattagtgataattgtatcttccaaagtacaataaaagaacatacaaagaggattcctgcgcaggcgttggtgacacacgcctttaatcccagcactcaggaggcaaaggcacaagatctctgtgagttcgagaccagcctggtctacaagagctagtcccaggacagcctccaaagccacagagaaaccctgtctcggaaaaaaaaaaaaaaaaaaaggaaggaaggaaggaaggaaggaaggaaggaaggaaggaaggaaggaagaatggaaggaaggaagaaaggaagaaagaaagaaaagaaagaaaggaaaaaagagaactcctgcaagacaataacgaacattaattttcaaaaataagctaaagtacaagctaatctcatttaatgaaaacaggtcaaaaaaccccaaataacacctaagtaaagaaatgcacatcatcatgtattttttaatctcccactctgactaagaaggaagtctggactaagaatcttagtctggatggaaatgtctgctttctaataagaaacactgtagatggaatataagaatgcctatgtcactacatcacttaacacataaataagggggaaatcaagtagcctactagtgaaaaggacctgcacattctgttttgaaaggtacggtgagcttactaattttaacaaagggtttatttaatagaagccttagttcaagaacggagaaatcttccttagtcacgggtgaatcagtactaagttctgaatacaatagacttttcctctatacattatgtatctacatttaatttgcgaattaagaggccaatcataactactcacaaaacaacaatttcaagaaaataccgaaagctacacgaatgtgctgtctctcatctcactgtaccaccttcacctttctgacagtgcgctgcttccgtatgatgacgtgaggagagtaatgaacgcggtggagtagcacagctctgtgctgtaaggattaccagaaggtaattacaatgacacctttgttactgaatttgggggcagggacacgactagtgacccaaatcaagtctagccacccatcctcaataagtcacttagaggagccaaattagcctgggggctgtgttgcacacctttaatgccagcacttggaggcagaggcaggtggatctctgtgagttccagaccaacttggtctacaaagtgagttccagcatggccagggctcaaaaaacaaaacaaaacaaacaaacaaaaagagccaaattaaaagtggaaagaagaaaaaggagatttattcatgtggccacaccgggaaacctgagatcaaagttaaaagacagggccaagaatatttacatctaggcatttctggtcaaggtgcgttccaactagcattgacctgccattgtctaggctcttatcagcagaaagcctacccaacaacagcagaatatgcgcttgttctaagtgaccacaaaatttataccaaaatagacttaaaaattctacaaatttaaaagttgaaatcatactgatatcctcataccacagtaaagttaaaatcagtatcacaaagaaagcaagaaataatccaaacactaggaaattaaacacgataattaataatccatgggtcaaaggaaaaattttaaatcacactgaactgaaagaaaacaaaaatacaacgtacgaaaatgtgtgggacatggctaaagcactactgagtgggacttcttgtgcacttcacgcttttattagaaaaagacatctccatcaaaactccacctcaagaagctagaaaaagaaaagcaaaataaagccaaaactaaagaaatgatacaagcagaaattaaattaaaacaagagaaactgaaacaaagccctacccctcccatgaccatgggagtaaaggggaggggaagaccagagcctcaagtactctgggcaaatgctctaccattgagctatagccaaaaaaatctcaagaatacaaacaattatattttaaaaggggcaatgacatgaaaagacatttcataaaaaacattagatatatggtagcacatgcaaattaatacaatgaaaaatgacttcatagtaagcatggcccagaatgactaaaataaaaggtatttcaaatgctggtgaaggtgtagagaaaccgaagcacttgtacattgctgatgctaatacaaaatggaacccacactgaaagaacctggcaccaccttaaaagaggcaaatgaccatgcaaccagaaaaaggaagactgtgggcctcataaaatccaacccacatggggctagagacatggctcagtggttaagagtactacttgttcttccagaggacctgggttcaattcctagcacccacataaatattcacaaccatgtgtaactccagttccaaatctgatgccctcctcctctgacctccgagggcaccaggcatgtattcaatatgcagacaaaataccctcacattagaacaaaagaatctattaattgtgtagaatagttcaaaattagaaacgagccagctgttattttttaaaaaagttattttaaaagacaaggcagagatactttcgattcattctcatactcgggaattttttcattttatttatttatttttggtttttcgagacagggtttctctgtgtagctttggaacctgtcctggcactcactctgtagaccaggctggcctcgaactcacagagctctgcctctgcctcccgtgtgctgggattaaaggcgtgcgccgccgccgctgccgccgccaccaccaccaacaggcctcaggaattttttttaaaggaccaaactatattaaaaaataaaagtttaaaataattttcactcaataatccacaagctgcatgctgtcaaggataattatgagcacagcccaacaaactcctaaacttactttaaatatcaactctaagattttaaggtatgaactttgtaactttgtatataacattgttgtatcaaaaagacacccctgttgtatcaaagagactattgttgaatgaagcatctacccaatatactttatagttccactcatataaccttttttgttttgttttgtttttagagacagtgtttctctgtataaccctggctgtcctggaactcacttgtagaccaggctggcctcgaactcagagatccatctgctaccacctagtttatatcacatttcttaatgacaaaactggaactagagaacagatgagaaggaatgagtgaaggaagacaatgggtgtgagtgaaaaggggcaatatgattaacttttccttttgattttagttgtggggggagggagagcatcaaggtccatcaggtaggtaaggagaggaatatactcttcagggaatggtatagtgaaatgggagccaggaggataagtctcacaaggaggcatgcgggtatcattcagggcagtaaaatattcttcgtaagaagctgaagaagtctctgcggcttcagggaaaggcaggactgtcttctcaatgggactcactgcactccagtattgggaagggagaatggtagccattccactgactctggattgccttccttaatgtagatcatgtcagtgaggcagcgctagggaggcaaaggtttgactggtgttagagtctatatttccaggtattgccacagcagctaggcaggcctccaacccttccacctctaccaaggattacactggcaaaaaccccccaaggggaaaagctcctgaggcaaagaaacatctcaaggctagtcatcttccagggacagtctgatcagaatgcagattctgtgcaacaggccaccttcagtgtgtacaggaggtactgtctgccatagtcctgccccaggcagctggctgcagatgcagactgcagaattccggcttgctgccatcatgaaccacaggtgccccaacagccacttggcagcttctggccaaaccaaagtcggccagtttgactgtcccacttgtcataatgtttcttggtttcaagtctcttgtaattgacataaaggatgaatctaagcttttaaaaacgagtgcattagatccttaatggtctcagcctgatggggggttcctagtctagtcaaatattccttaggtcttggtcgatgtgcctcagaaataccacctcaccaactgtgctgaggggaaaaccgcctctagctctcacccattaagaaatctcatactctttttttttttttttttaattggtggaggtatagaatctactgtgtgaatgaccagcctgtcccatgagctccagtaccaaattcagaccctggctcatatgaagaagtgcccattctcatatcaggagaaaccctcacaccgagccaagagctctaggatggtctgtatagacatgtgaaaaccaggtaatgtggggaagtttcatagtcataaagatgttctgtagctccctgtgtcagtatggataccctggttgtgatactattggtacaatggattgatcagacggccccattaggaatgtgggtagggtatagacaagaatcttctatttaagctgggcagtggcggcacacggctttaatcccagttcttgggaggcagaggaaggcagatctctgtgagttcaaggccagcctggtctacagagtgagttccaggacagccagaattgtttcacagagaaaccctgtctcaaaaaaccaacaaacaaaaaataacctacttatttcaactgtcaatgaagttacaatgatctcaaaaagattcagttaaaaaaaaaaaaaaaagatggcacatagttccaacaaaatagcattcttacagcatccaaacaagagcagaaaacaggtcgttcagattcttgacaagtttggtatgtcttgtttgaggcagccaaagatcatcacttgggagtacaacagaggcacaaggcaactcctaattaacaggacaatatgcaacctctacatgtcattatctgtcctctggctccctccaatccagttgtcttaacaattccaattaccaactcatggggggggggggaattataggctcaccttccttttagaagacctaatttacaagcagcagatttacctcctaagtccaccagctaaccaaaagctgttttccttctcaaagaacctcatgtagcatttccacagcacatcttaaaggattctttcgattaaaactctgcttaaccttcccatttcaggacgacatctacttaagcatgtggaacattcccacagacccaagtagctcttccaattttgcagaagacgactctgacgcagaacatatgagtgaccaggtaaaagcaatcttatcaactgactcctaaacttaattaacacttctacccaaaccaagtgttgacaccatttggatgattcaaacaactacctatcatgtggacttctccatttagccctcgcataacagaaattattagaccaagtgaactccttaagcctgtgtgaaatccagaggtaaagataccctggacaagccaggcgtagtggttcacgaatttaatcccagcacatggagacagaggcagggatctctagatgtctcagagttcaaggccagcctggtctacagaatgagttccaggacagcagggatacacagagaaacactgggtgagggtgggggtgggggtgggaatgggggttacctggaacaggtgctgtatcatgccaatgaagaacacccaagtctgtaacaggaaaagaagcccctcaggctggagctggctgaacactgtagtcctcatgaaataagacacttaaacccatcagctcacttaactatcctggctattttactttcaataaaaagacagaaacaagccgggcgttggtggtgcacgcctttaatcccagcactcgggaggcagaagaaggcagatctctgtgagttcgaggccagcctggtctccagagcgactgccaggataggctccatagctacacagagaaaccctgtctcgaaaaaccaaaaaaaaaaaaaaaaaagacagaaatattacttccttctctgacatgaagaatacaatgaggcagtataattggttgtgttcaagagtgaactataaattgcttatgattatatttttgttgcttctgttttatttagtgttttgccctttaatacagttcctcatgttgtggtgacccccccccaccataaatttactttccttgctacttcataactgtaattttactactattataaatcctaatgtaaaatctgtttttcccaatggatttaggcaacccctgtgaaagggacgtttaaccccccaacctcatcccatggggtttccacctacagattgagaagggctggcctagctgaccccgctaacatgctccattcctgagttctggggttacagcaggtgtgtgccaccataccaggtatgtctgtagagttcattgaaaccattccagaaccatctttctttagaatcctatttcttttcattatttaaacctctctgcacagaaaatgggcaattttatttaatgtgtcagtttctttgcctgaagtcccagggcttgggtatgacctgagtttcattcacttctgaaagcaatggtcttcctttgcagcccagactagctgcaaattcagccttctctacaggaggttacaggtataaatactaccattactagttccttgggcagttctaataggacatattgttattcctaagaatttaagacataaaagctttaattaataaagtctaagagtttttaaacaccagtactgacatttcaataaaattactgctgttataaagaataattcttgactgtaaggttcatcctgtatattgtagagtattagtagtttcttgggctctccttggtaatttccccagtaacatccaaaaatgtctctaaatactgtcagcatcccagagagcaaaactaccaataatatgcaaatatgtagaattggtcacctaaaagggaaacttcaaaggcacaacagaattctctttaaatatttggaaagtttccaatggcagcagagaaaggcttgggaccccagacagcacagttttacccacactaaactggcccctgttcctcctgctccctgggtcctgctcatgccatctaagcattagttagaccccatagtcgtcatcccatgaagcaggactacttgaccccactttactgacggaaaaacctgagttcatcaatgtgttttcctttgacatttatttatgtgtgtaagaggtgggtatgtatgcatagagatcagaggacaaccagagagagcactgtggtgcactcttagacacagacagatacaaaatacttaaaaggaactgtttctttaacctatagagatcctcacagccaccatctccactgtcacaacagaaggacatccagaatgtcttccttacaactgctaggttacttatttattctgtgctctgggctccacactagactctggctacttcatcatgctattccactcaagttcttcctgctacaattcaagggcaaccaacttctagctatagtcccctcccacaaagccttccacataatgaggctcaataaacttctgactagtcccgaggcaggctttctccaaagggcactcactttgggatgtttaaacaagcacccttgggggatgtgactgctttttacgtttcagatggagactgtacaaatcccataatccaggtcagtaagaggcagagatgaagttcccacagatttgactacccaaatcatgtgtccaaggctacatacatgtttatgtgtatgtatattttatgcacacttaacctgagtacatactcatatgcacattgtctacaaacgaaagtagagatgtgtatctgggtccctctgtaagtaaccagacagatgagcatctagctagaaggttcctaagcccttaagtcagcacaaggtctatggcagactctattatactagtacattgaggaggtagctggttgggtttttctgtcaatctgacacaaaccagaatcatccaagaagagggattctcagttcagaaagtacatccatcagatgggcctatctgcaagcctgtaggacatttactagattgatgacaaatgtgcaagcgcccaccccactgtgggtgatggcacccctgggagggtagtcctgtggtgtctaagaaagcagagtgagcagatcaccaggggcaagccagcaagcagcattcttccttggtctctggttcaagctcctgccctggcttctcttcctgataggctacaacttaagttgtaataaacccttttctccccaagctgcttctggttatagacttttatcacaacaacagaaccccaaggcatgaggtaaagcaaacatcagtgcatcccataaaataactacctccccgggtaccagaatcccctacccttcagagaaaggcaagtgtcaagtcctatgtgagttccattcaagttcttagaaacatgaaatagtatactggatggaaggcaccaatcaagggccaactctgaattgtttcttatgagtaatatatttgtgaaagaaggcctagggtctccaggctaaagcacttgtggtaaaataataataataattaaaaaacaaacaaaaaccgtgcccagtagtcatagcagaagcaaggatggggttgaaaaacaacaaagccaaccaaacaataacttttcccaaggaccagatttaaaacttgggggaggggtttaagggaaagagcaccagctattcagcggcctctcctcaactttgaggttgacagttttctttcagttttttttttttttttaaaggtctaactatgtagccctggctagcctggaactcaatgtgtagaccaggatggccttgaacttgtgatcctcctgcctcagcctcctgagtgctggattacaggtgtatgacctgtgttctctccagcactatggggagcacaggaacttaatcttaaccttactaagcctttctagccttctgtttccatcaccacacacaaaatttcaagagtggcagaaacgaaattaccaataaataaataaataaatattcagacagatgatgaaatgtctagtcatctattccaggagcctctacaaagttaaacacatcagcctgacccagaagtctcctgaaccaactacagcccctctctaccttcaggctatgggaaggttttgattcaattgtctcaatttggagagatcagagagacacttttgaacgtgtacctaaattctagggcaacagctgaaaaccaaagccacttaatgagatgtgggttccaatgatcggtttaacccatctgcctttgtggggcaaataaataaaagagctctgaagcctatagctaactgtttggtgctgcttttcctgaagataagacaattaggtctatgacttaaaaattaactccactgagcgtaatggggcaggcctgtaatcccaacacccgggaggtgaaagcagaaggaataggagttgaaagctcggctataacccaagtgtgagcctagcctgggcaacatgagaccccatttcaaaacaaaacaaaaacccatcccaaagattctcgagtgcgcacatcagtaactaatagaaacaagcacatcatttaaaaataaaatttcgtaactgactcccgaagagatgtggggggccgagacacaatggcgacaagaactggtgtccaagcggggcagcggtttcagagacagacctgcttttcagagaacggggagaccaaccagtggtactttcctctccaaatgtctgaccgttactacgtgttggtccaataaactattttttctccttcgagaggtctatggcgaaagcaagcgtctcaagagaggggagtgagtgggcgacgcctacgattcgtagcagcgcgcctgccaggaaaacgtgtagctgtttactacccgcgcccgggagccgcagggaatcgttccacgcgtggcgcagctcgggaccagatccgcctcccgcgccgcccgaccaccagccctcccacgcaccccgcggcggctcgggacggcgaccccgatccccgcccccacgccccctcccgagtcacctcggaggcccgggttgtcgtccctggcccgaatcctgcggatcttgaccgggcgcccgctcagggtggacaggaccagccgctggcgcaagaagttgcaccccgcgtagctgagggagtgcgcctgggtcgccatgtgcgcgcggcgcgccgagggctgggagctgggaacgcgacagggaccaccgcggcccccgacgcgtccacgtggtttggaacaggaagacagagcgactagacaccgggtcagaggggagcggggcggagccagtggccgcctgcccgcctcctcgcctggctggggcggcccgggcgccggggcacgctgccattggtctgtgggggagcagggcgttgccctttctgcgccgccattggtctgctctgtagctgggcggtgctctggccgcgccgccattggccggtagtgaatgagggcggtgcccggggccccagcaacagcgcgcggctgcaggacgcgtagcgctgcggggaaacctgggcgcccagacggcggtggggtctgtctgtgtgcggcttccccggcctgagagctagacgaagcaatggctccgcctgggtgcccgcagctgcctggtactcagccttgcatctgcagcagccccttggcgaagatgctatgcacccccgtgttttcccgacagatcagagaacagggttggcgcgcttaccctgttgttctcgcggtctggatctgagctgtactcctgggaggtgcagcctacgattgcaaagctgtcagaggctgcctgaactaggacccgagcctttagacaagaggccactgtttattttgtaatgagatgcttcgcattgtccctttcttatctgccccttcgtttatattctttgagtttggtgtcaagacagatccttcacctagcatgtctcaaaatggacaattacagtaacttcgaggcatacatgagcatgcatacgcgagcggggaatggggtggccttgtttttccatcttttctgtcatccaagcctgagctccaaaaccttcctaaatactggattatttcacgcctctattcaaaaactatcaaatgactaccaacttaggaacccagtatcttaacattaggtttgcatctgtttatgggcggtaagaacagaccttgagtcccagaaagccccgtggaggatgggagtgggagaggaagaaagatagcgggtcagagtgacgagaaaacccccgaggaacaactggagggtagcaatcagtgcagaggtactcatggatcagccctgaagtccgcggtggtggctaacacacttatggtaatgccagtctgtgatgctgcctttacacagctcagagtgatctcaggtgggcagcgttggaaaagctccaggaccctcaggggctcctctaaatgcttctgtgaagactaccaaaacacagggtgtactttcacaccaggaatggagtttttactttcttttttaacgctatctcgtttacttactcaatagccttaagaaaacaattattattcaatgaagaatgtccacgtcccttaagatctcaccgttttcattgcaaacacgctcaaataaattatgcccactctaagccctgcctcagcatctttttctgggcaattgagactaagtcctgacataaaatttgagaactgagattcagaagggggagaggagcagcgagcttgttgtgaacaacatggtaaatggcagagtaaaagtgaaatctatttattcttttagacgtctgatccttccagaaacaaacaaacaaacaaacaaaaaagatgggcctccacacagctgaaggatgcagcaacatccacacagagagaagagtgctagctgccccagctgccagaatcaagggccggacagggtctccaataagcccctggattatttcacttgacacctaccctctggtcttccgagccaccctcactaatgccatctggagcacagatgagttgttccactgagccctgcccaaaccacatagccacaaatgaattattgccactgtttaaagccatggcttggggtggtttgttacacaataataaataactgaaaatgatttactgtggtatgaatgtcttgtttcaatttaggtaagttctactacacatccctgatcggtaaggagttagcaagccacaacaaatgttcctatgatattactgagtgcatgcccacagtcaatttccacaataaaagccttgtatatcggatctgattttgtcttcacaccaagctagctcacaagttggactgtacctaggtaaaagcttatgacacagctctgttgaagtttgcctatatttacatcgccatgtacatgtattaatttgttcactaagtaaatctgcctaacgaaatgacaaatggcatacatctcattctgtggtcacttctatgctaatagggacaaaaatctgctggactcagccgcagggcattgggtttaggagccagggtagaagtaaattcttcctacctcacagaaaagtttgctcaaaaccatacttccacacacaccctgctatttttgtcatctttcctcaagtcatcatggatcccaggactttttcttgcctcagtctagaatggatgcttataccaccagagctttagggtgagtttcttgtccagtcctcctcaagcccttacaatgactgttcaaaaccctgtttgggtatatactatatagcccttgatcacttgcttatgtgctcgcctctctaacacactttgcatccagtaaaggcaggtctgggatagtttcttatgataagagcatttaccatgacaataagaagggaaatattttcattgtattctccaagcttagcacctagtagaagtttaccgaaagtatgacctgactggaattattacttaaacagttgactgaaaggtacataggaaagataagccagtaaaaatccaaagcgtcaaaatcattgattcttaaactttggcatacaccaaattgtcttgaagggagagctagcaaggtggcttagcaggcaaaagtgcttggcagagaagtccagtgacctgagtgtgattaatctctgaaactcatataaaggtgggaggaaagacgcagacccctgacttcctcatgcatgctgcagcatttgtcacacacacacacacacacacacacacacacacacacacacacacactaaaatatatgcttcaaatttgcccaaagagttttgttataacacaaataaatgaaagatccagagactgatatttattggggttaaaacttcaagctgggcagtgcaggcctttaatctcagcactgctgaggcagaggcaggcggatctctgtgagatctacaagagctagttccaggacagcctccaaagccacagagaaaccctgtctcaaaaaaaaaacaaaaaacaaaacaaaacaaaaaagcttcaagctgaagatcagaaaagcaaagtagccggccattagctcttaccactacctcaggttgaatgggctgattctgctgcctctcctcagcctagatagagaatgaatgcctgatactgagaccttgctcctgtcttatatacctccctagtgctgggattaaaggtgtgtgatcccaggggctgagatcatctttgtgtgacctgttttatttaggactggatcaatcttatgtagatctgggtagccttggacagagatccatctgcctcttaatcctgagtcctaggattaaaagtgtgtgatgacacacacccaatgtaaggagtcgcacaaaaacaccagctacacggaggacctatcgcagacccatgcaggctccatgttcgccagttcagtctgtgtgagccccttggggccctactctgttgctgtctgtggtcatgttctcctggtatcctctggctcctacaatccttcctctcctcttcaagagctcaagggggtggaacctgatggagatctccaatttgagccctctctctgcctaatatttgtctgtaggtctctgcatctgctcccatctgctggctgaactaggcactccgttgagtgtgtaagaatatcattaagaatgaatttgattttttttctatcctaggtctctgggctctccagcctcccattcctggccatctggacagtgtaaggcatgggctccctctcatggcatggatcaaattagaccaaacattgcttggccactcccaagttctgcacctccattgccccaggacatctttcaggcaagatagactgtaggctgaaggctttgtggctgggttgggatcccagtcctatgaccagaagttgcctgcttacagaagatggccggttcagggtccagtaccctccattactaggactcctcactagggtcacccttgtagaacctgggagtttatacgtctatgttcccacgtcactgtccaagtgtccattccagttgtctctccccgtactctctccctccacctctcccgccccaacacacaccggatgtgcaaggccctgggttcagtctcgaataccacactctcatttgtaaaaaccaaaatgtagaagcatcccaaatgtccatcaactaccaaacagacaaaggggtgtttctgcataatgataaaggactatctacagtattgatgaatctagaaaacattaagctaaatgaaaacagcaagacacaaaaggtcacaagataagaaagatgggaggtgtgaagtttcgttctggggttgacagaatgttctggaattaagaaagtcatgctttgcaacattggggatattcagggaatatacacttttaaatcactggactgtgtacttagaaattttaaaaactgggagttttgtattatgtgacttttatctcaataaagtgtaacttgtgagttagaaataaataaaacagtgaaaacaataatctaatagtagaaacatgacgatcactacgacggcatttgctaagtcagtaagccctaaagcacattgtcattgctgtggggagtgtttcaactccagaagttgctaaatttggtattgacacagacatccttcactctgctagtacttatgtggtattgagtcacatttattaggtcgtgcttattatgacaaaatgaaaagaaacagaacaactcttcttgtaagtggcctgagataacctgtgaagactattccccacactctcctgacctagaaaaacctacaaaaccatgcaaataaagaaattcaagtctttgtgttcacttttagaaacctgtgaaactgctcaagccatcaagcatatgcccatccaaaaagtcactgagtatctaaaagatgtctttttttttttttttcaagacaacatttttctatgtagctttcactctgtagactaggctggcttcaaactcagagatccacctgcctctgcctccaagtgctgggattaaaagtgtgtgacaccaccatccatgcctgcaaatgtgtgtgcgccatatgtgctcctggtgccttcagaggccagaagcaggcaatgaactgtcatgtggatgctgggaacagaactctggcaaaagcagtcagtgctcttggccactgaaccgcctttccagccctgaaaaatgtcattttaaggaaggaatgtgtgctagcactctgatggtggagttagcaggtgtgcccatgctaaactgtggggctgggcacagggttggttgatgggggatgtccttctgtacatatgtttctcttattggttgatgaataaagcaccaatgggccagtagccaggcaggaactataggcagggctaccagacaaggagaattctggtgacaggaggcagagagtgagccgacagagagccgccaagtggctaccaggaaggtaggatgactcagcactctctggtaagccaaggccacggaagtacttagattaatagaaatgggttattaattaagagagagctagccaacaagaagcctgagccattggctaaacagttcataattaatataagcctttgtgtgtttacttgggactaaacggctggaggaccaggtgaaacagaaactccatttacagttggcggcccaaaaggagtactgagtttttgctgcacatgctttaaaatttagacactgatgctgaacttaatgggttagctgtagattctctagtcattgaacatatccaggtgaacaaatcacccaaattgtgtcattgaacttacagaaaaaccctgtctcaaaaaaaccaaagaaaaggtggaggggaggagggaggaagaaagggggggatggagggaggaaggaagggagggagggaggaagggagggaggcaggaggaggaaagtgtggtggttagaataaaaatgttcctcatagactcatagggactcacattattaggaggtgtggctttgctggagtaggtgtggctgtgttggagaaagtgtgtcactggggacaggctttgaggtctcagatttgttcatgtccggccagtggctcactgtcttttcctgatacctgtcaatccaaagatagaactctcagctacctctccatcaccatgtctgcctccaaggccaccatgcttcctgccatgacaataatgaactaaaccacctccaattaaatgtttccatcattaagagttgcagaggccatggcatttcgtcacagcaataaaaccctaagtaagacagaaaggaaaagaaaaatgtttaaaaaccgactgaagctctagaaaacaagtcattgaatttagagaaaattctaaaaaaacatgtgcgacaaaatacgagattaaccatcattacacatgcaaaactcccatttattcatgattctgatgttaatatgctcttactgaatttcataaaatttgagctcctaggtgctacagacacaccttgagaacagttagagactggtctctttaccatgtggtttccctagttgtcccaagtcaaactgaaccttcttcaaatacagtaccccaaagaactgttctgggccagagataatgaacatcaggcatgagaccattcagtcactttacttacaaagttgttttctgccctatttatattttacttcacaattttctgtttctagcacacatggaaccagagctcccatatactcagatacaaattggtcatttgtacaaaaggaaatgtattaacagagtcctatgttcttagtaaagatcacaaatggagccgggcggtggtggcgcatgcctttaatcccagcactcgggaggcagaggcaggcggatttctgtgagttcgagaccagcctggtctacaagagctagttccagagaagcctccaaagccacagagaaaccctgtctcgaaaaaaacaaacaaacaaaaaaaccaaaaaacaaaacaaaacaaaaaaacacaaatggctaagaaggggtcttattttggttgaatttcaacagttacggtggaggttactctattgtgttagttggagtttctattgcagtgaagagacaccatgaccatcgaaactcttataaaggaaaacatttaattggggttggcttacagtttcagaggtttagtccattatcatcatggtgggaaacatgacagcatgcaggcagacatggtgctggagaaggagctaggagttctacattttgatttgcaggtaacaggaagtgaaccgtggcattggagtagcttgagcatagaagaatcaccccctccccccatagtgacacactgcctctaataaggccacacctctcaatagtgttcctccccataggagccattttatttcaaaccaccacaactatcacattcgaatttacaaacatgaaattgctttttggtaatagagccatagactttagtaggccgttagaccttagcacaactgtttccatgatggaagtgccattcgggctataaaactcagcttgttttatagacagcaccacctgccaaaacaaagtccatgtggttctgagaagtctcaacatgttctaaccttgatttttagcttctggagttctgcctctggctaaccaaagtatgtcaacccagaagtcagaacatggtttttgtgtttaaacactcatcctgagaaagtctcagtgttacactgggattccaaccacccagcgtggtcaccagctgactaataaagactttctattggcttatacccatgtcgcagtcttctctggtgaacaccccacatttctaggccccacagagattccagagaccaaactttgagacactggagacctcagagccacttggagtgtggtgttcagggaactcttagggatgtgcaatctgagatatttcagcttcccagggctccctcggatcaatcccagcctaatgattggaggggtctgacatctctgccccaaaaggaaacaaattagaaagttgcctcatctgtcacttccagacagtgtccagaatccatgtgacacatcacgggttccttctgtctattcaggtgcatgaatgtgtggtggtcaccattggttgttttcaccccctctccccagtgtgtgtgtgtgtgtgtgtgtgtctgtgtgtgtgtgtgtgtgtgtgtgtgtgtgtgtgtgtgtgtgtgtatctttctatgtatttctttcagttttgtttccctgtattgaccagtggcgttctctggtgtgaccctcccccaaccagtttcagacctgtgccctcttctgttggggaccctaatccttttggctctgccaggcccacccagagaaacccaaaatcctctacctggcccactccaggaacaggaacacttggttcggttgctttactcctcctcacagtcagggttggtccctgtgtggaggaggggaggggctgggcctctcatccaggacccctgccacctaaagggaaggcgcacaggaagggggaaacagccccccgcccacatgagcattctctgttctactcctgtctactctaagaagccccaaggaaggggaaagttcctctggactgagacgggaggaaaggagaaagttctactctttttagttaccctatatatgtctgcttctaaaccaacaatccataaaactctgaaaaaagtgaaaagaaaaaactgcccctggtctgggcagggggattgtagccagacaacatagcctggaaagaatggattttcccttctgtccaacacggaccaaggaaaatttaaagaattttcactaggcccctttaaaggataaagacagctcctaaaaacatttccttcattacttagtcagccccagattttagaaaaaagttttaaaaattaaaattataagtaggtcctagttgctggaggtagtttaaagggtgtttcacagcacagaactggttgggacaagacctttggcataaactgaaagcctctatcaccttctccaaagatgagatgcaattagatttatagatgaccagcaaaattttgatgtctcaccctctgtctagaagaaattaacccccaggattggtccaacaccaagctcctataattgttcaactaaccaattcagctacttccatccagattaaacaatatccagtgaccctgaaaacaaagggagaaaagcagtccatattgcctggcttgaagacacaggcatcctagtgccctgtcagtcactccggaatatagctctcctgccttcgaagaaacctggggcctctgattctctgagtcttccagagaaacaggtgtccactctcttgggcatgaaagatacattcttcagcctcccattggcagaggtgagtcacccatctttgcttttaaatggacagacccaatgggaggttacagcaagaaacatacctggaccaggttgccccaggatttaaagacactaaatgcaaaattcctgcccttccgtcagaggtttcctagaaaacagattataaaagggccaccaagggactgatgcaagagttacagacgttgggctatgaaatgtcaactaagaaagccaactgtgtgcatcagaggctaccaatcttggccaccaaaaggagacaaaaggagcctgactcagagtaggattgctgccatacttcagatcccaactccaaagactaagagacaggttcaagagttcctacgtacagctggacatgactgcctctggataccagagttttcagaaatggcaagctctctatataccagcataaaggggataccaagtccttaatctggactaagactaaacaaaaggcatttgaggctttaaaaacagctctgacttctgctccagccctagaatttccagatatctccaaaccttttcatcagtttgctcaggaaacaaaggacaaaggcccccaaactttggggccatgaagacaccttgtgacatacctgtcccaactattgcaccctgtaaccaaaccgcaggatgactcacctgtctaagagctgtggcagctactgctggtttaataaaagaaagcaaacaagctaattctgggtcaggatcttatactcacagcatccctccgaagagaacccatacactggctgtctgccgactatgtaaccctggaccaggccctacttaagtccagtttgagaaagccaccaccatcaattcagctacctgcttgcctgatgacacaggtgctcatccatgactgccaggagatgaaaaatgaaaccaggtatgcaggaactgcaataattgctttaagcaaaataatttgggcccaagccaagtacctcagcccagaaatcagaactgattgatctgactcaggctctcagatggggaaaaggaaagtctagtaccatatacttggacaggggttgttcttctactgttggcatgtccacagtatgatctatagagaaagagagcttctcaccactaggggtattaaaaaacaaaaacaaaaacaacaaaaacaaaaatggccctcctagagactatttgcctttccctacaaattgctgtcctctacttctgggcttctgacctggctgccagaaaaacagccctaaggccagtaaggcctattgatattctgatattctggtggcacagcctgacccagtgctacctgagattccatggtaaagaaaaaaaatggacaactgaaatccataggtcaatgaaggacaccaaaggtaaagatcattctcccagaaacaactggcaggactttggtaactgaccttcacctggctactcatctggggcccagaatactttctgcattgctcagatcagagtatgttacacctagactggacagcctagcgctggatgtctcagccggatgccaggtttgtgcttaagtgaatccaaaccagagaccccttacccaggaaggggacaaatgagagacctcagagaactgttcgaaacctggcttcacagagatctggcctgttgaggcacgaggaaagtactttgctaggttttatagatgccttttctgggtagcaagaagcattccccacccggactgaaactgctcaaataatagctaaaaagctcctccaggaactggtcccatgatatgtcctccccttagcaatggggttcaacaatgccctggctttcatagccaaaacctctcaataaatagctaaatctttagacatagattaaaagctctattgtgcatatagacctcaaagttctggccagaccaaaaacaaaaataaaaacaacaaagcctttaacaaaactctcatcagagttactccctgtgagattatgtttggaagacctccacaactgccctccaggctcagaaaccagcagttggcagaaggctctaacaattcctttctcaagtcactacaggccctccagtccagcataaaggctattcactggactgtcggagggacccagctgacctcagagtccaccaccagtttcctcttgttccagtccagtgatactgtcggggtcaggcaggtagacaaaggggcaccgaaaccaacctggataggactctacatggtgattttctccactcctgtgggtgtgacggtagctggctttacacatggatccaacatacccaggtcaagaaagaggaagccacagatgctgctgccaaatggactgtatccggactatggacccattgaaattaaggtttcattgggccccaggccctaccactgtctgcccccctacaaccatctgagacttgtgtttggtatgaatacagtgctatggtgcagccttaccaacctcaggcctggactggaaacgaaagaacacagctacagggaaggcattagctagtgtgactacagaccagcagcccatattccatcctgacctctactttttgatgcctgctttaagcatttcgttaaagagaaaaaaggaaaagatacagaaatttatcttttcagatgggaatacagagtttacaattctatgcagaaacaaaggagtttccattacaaaaattgaggttgtaaaattgaggcttccagaaaaaatcctttagaaagattctggcccttgggaaactggaaaaccaggggaatcagactctatgccacatgaaggggcctggctatggagttaatcattctcaatcaaaaatcagccaggattgctggttttgcttagacctgcatccttcttatgaataggaatcaaccaggctgtcgtcccattggcagacaaaactcactgtaactggagggtagtccaaattaatgttagagggctaaaacttatctaatatctaaaatcttcaacctaggcatgtccccttattctgatgcctgctagtctgccttatgggttaattcatctactaacagcaatattacagagcctctaagactacttggtgggcatgtactaattatttgactaaatatacctcttctaatgctttccaaactaagtagacaggctaatcaggacatagagatattaaaattttccatttctaaataaaaatgacagatatccttgcaaaaatgatcctacaaaattagagaggcctagacttgcttctcatgagttaaaggaaacttggctttgagagaaatctgttgtttctatgctaattaatctggagtaattagaaaaaaatcttggcttggttaaaaaataattgataccattctgttttcttggcccccctggctaactactctgctatcagcgctgactaggcctttctcattctaattggatcaacatcagaaccctatgtcttaaactaaaacaggacaggcccatgatttgactcattcactaagaccactggggaaggtaacagggccccagaccttagcacaactgactccataacagaagtaccattcaggctgtaaaactcagcatatagacagtaccacgtgccaaaactgaaacaaaggcctaatccatcaaaatccatatagcctgggaaagtctctaaatgtactagccttgctttttaacttctgtaattctgcttctggctaactgttcatgttaactgaagtatgtcaatcaagaatgtggtttgtgtgtgtgtgtgtgtttaaaaactcatcctgagaaaggcttgaggctacactgggctcccaaacaccaagtgtagacgccaactgactaataaagactttctagtggtttatacccatgtataagcagtcttctgatggataccccataactcttaggagaggaaagtgggaagtagaggcttctggaggagagatacagagaccaacagaggccagagtactagactctcagacaagggtttggtcactttccccacatggttggttttttttctaaacaaggctatatagtaaaaaattttgctaaatcttgggcctgcagagatggctccatttgctcttgtagaggacctaggtcaaggtcccatcacctgcatggtggttcaaaccatttctaactccagttccaggggatccccatgctctcttccacctttttgagtactgtttatacacagtgcacaaacatacaccccaacaaaacacacccataaaataaatcttctgaagtgtttgaatttttaaaagatgatgataaatctatatgtcaaagtaaatcagactgaacaatttgcttttgagttcataaatatttctaattctaaagtctccacatttatacaggttcagagaatgtaacacagggtcatataagtctcttgtcatgtaatgaatttcactcaggtctgacattatctccatggatccttaatgaaaccacaatggcactgagattctaaaaatctatccaagttttaaagagagtaaaaaagagcagtaacgcctccaaactacagggagaaaaatgattcttttcttttgctttttgcttggtttgaaaaatgctggaatattcaagaacttaactttaacaaattgtggggtttccttcctccagttccacttaatatttaacaccagctgtgttatgttgactttcagaaacctaagtaacgaacagtgggtctgggatacaaatcaccgagggtttcctatggaagtgctggaaacaagatacaaggacaggaagcttagaccaatgcaaccacagccttaaacatgaatctcctgtcattgtcgtacgtgttcatggtgattggaaatgcacgccctttttttttctttcttttttgttttttcgagacagggtttctctgaagctttggaggctgtcctggaactagctcttgtagaccaggctggtctcgaactcacagagatctgcctgcctcagcctcccgagttctgggactacaggcgtgcgccaccaccgcccggctctttctcttttttgtatcaaatttcaagaacaatttggtcttgaagtgcatttccaaatttaaaggagaccatatggacaagatcagtgtgttcaacaaaacagagagtagtgatgattgtattaataatatgcactaaaaactctaaatacatgaaattaaatctcctcttgagtatattttgttatgtgctacgtaggaggactggataaagcagaatcctcgcttctgtgaactgctctgctggtgagagacaaaaagtcttagatcccgtgtgtgtgtgtgtgtgtgtgtgtgtgtgtgtgtgtgtgtgtgtgtgtgtgttacatatgaatgtatgtgcacctatgcatgcatatgtgaaagccaaaagtagccttacacacacacacacacacacacacacacacacacacacgtacatatacacagaactaagacacatcatgtgtctttaagtgcttctccacagtttttgaaccattgccttcacatcagctcttgcctccataatcctgccctgcttgtgttcctgccatgatttccttcaatgatggattatgatatgaaagtgtaagccaaataaaccctttcttccctgtcttagctagggtttctattgctgtgatgaaacaccataaccaaaagacaagttggagaggaaagggcttatttggcttacaggtccatattgctgttcatcatcaaaggaagtcaggacaggaattcaagcaggacaggaaccaggaggcaggaactgattcagaggccatggaggagtgccatgttgtcagatatttatttggactgccagctcacaaataacaacatggatacttgttattaattataaaagctctgccttaacttaaacttattcctaactagtttttataacttaaattaacccatatttttaaatctacattatttaatgaggcttattacatcatctccgtattgtccatcctgtttcctcaccttccttattcccagagtcttctaacttctccctgctttgctattggccattcagctctttatgaaacaaatcagaaggctccttcacaaagacacaccttcatagtgtaaacaaatatttcacagcatttcccccttttgtctaaataaaaaggaatgggtctaactctaacatagtaaagctacatataataagaacatttatgcaggtaagaattatactgataatacccaatccatttgcatttgcaattttggagacaatactctattatttatcctatcttgatgcttccaaacttttacacctaaactttctatcataacttgtattatcatcataaaaatacctttttagaccttaagacattttattagataaacagcttaagcttttagtttctaaaccttagaaactttacatcgattatataagtttctcttttgaatttggcaacaaggaaaactgcaaaactataactatctagccttcaaccccatcaaagacccaagaaggatataatattacctgagtaaacaggagtgtagaacaaacaactccaaaactatagaaacaacaaagacaactggctgcctagacagtaacaccaagattcgtctgtaacattggggtatccatcttcaacctacaggtcaagaatatctgacagacttcttgtaaaacaggaaattttgaatgactgtcctaccttgtcttggcaaaatttggcagttgccttcttttgtgtcctgcttgtccagtttggacagtattctgtagccatcaaggcaggggcactttcttgaccaaatggctagctttgccacaaagaaagaaaattccatatggaggtgctctgatgcccatcaaactctcttgaagtaaattggtgctcccaggagcaaacatatctcactgttgtgaaaagccttatattattaaaatattataaatgttatattctttatgtctttgaagaccctatgattatctaaaatatatctctgtttgaccttgaaaacatacctacatgactacaagtttgattgtaatagatgattaactactaacatacattttaaattatcttaaacagtttgcaataatagtctttaaggactggaattttacattacattttaaaaatgagctgcatagtataatactttaaacaagagtagaaacatatatattgttataacaaaaataacattaattttgtatcaatatgtaaaaacccacaccaatgtaaaatatttgaaatgagtggttgcttttttagtttaaaagtagattcaataatctactcttttatcctagcattcttgtatccctcctttttcttttcagaatgagatacttgaatctaacctcctttgctggttcctcccggaccatgaccaataacaacttgtaaccaccccccaatgatgacaaaatacactcaatgaccaaaaaccacaaaccccacctcttgaggacatgggtggcatgttctctcgactgtttcctgctctctggcagtgacagcatcattaggggatcctgagaaaatttggataatggtctacttctggaagagctagctgtactatttttttttttttgtttagtctttgtgtgatggtaaagtggagagcttgtctgaagttttggctgaagtactctgtgaggctagaccatctcagttagcagctttgaagttgttctggatgcagaattttgaggaaactacaacagaggcattctgagatcatctgggatacttgtttttattggtgtctgggatttttgttttgaaaagacacagacttttaaaggtaacatatctgtctgtattaacacaagtatggaatgtttggtgtgtactagtcagctaaagatgtttttttttttttttatgtttgagaaggtatttgtccactgtataagtccatttggactttctaataaaactataatataaatctccatccatatgaaaagatggcatgtaataagtcatgaggactctgaagccaacaagatttatcatgtttcatccagtttcagagctgttcccatgcagagggatcagcaaacatgtcacctgtcatgtagtcttttctggattcctctctcatgtctgtagccaagatcctcaggaggtcttccctgatcaaatatgatcttcattaattttgaaggaatacatagctttttgtttcctgtggaaacaaaagcacaacctctcccccaatgcaatacatttcctgacttccattttgaagccaaaacatctctaaagaatatagactggtttaattcagtagtcccttccacaatccagtgtttctcagtggctgctgttctctgttcattagtattcaaaaattcaaagttaacaaagcatcatatgggccggacattgatggctcacgcctttaatcccagcactcaggaggcagaggcaggaggatctctgtgagttcgaggccagcctggtctccaaagagagtgccaggataggctccaaagctacacagagaaaccctgtcttgaaaaaacaaacaaacaaaaaagaagcatcatataaggtccaaattccctatgttataatatttcccatacttacatggcttattttttttatattaccttactctctctttaaagactttactattatttttaaactattttttctatggctgtctctatgcattttcttttctttgttcagcacctaagcaccttgtatacagtttagttttgttaaagttaataccattcctttttatttagataaaaaggggaaaatgttatgggaaacttgtttatgttgttgctcaaacattaccactggagtcagaccttgcttcaaagggcagagtccacatttatctggatggaatggaccacagagttttctggaagactcagaggaaaatagagggacacacagaaggaataaggaggggcctaaagagatgcaggactttttcgattggggaaggtggagaagagggtcaggtgattgtttctccattgctccatggatctctttggtttattccctaatatttaactcctgaatttcatttttaaataaaacaataaaagatgttgcgatgttgctgcttactggcttgctcatcatgacttcttgttcaacctgatttcctctagaactgagaaccaccagcccagagatggaaccactcacgatgaactgggccctcccccatcaataactaattagaaaaatgtcttacagccaatcttatggaggcattttctcaattaaggtatcctttcagatgtctatagtttgtggatcaggctgacataagaccagccagcatactcaccaacttgtttttgatcatactgttttatcacagcaagagtaaccctaattaggacagtaatcaattcaagtatgcacccttcaagcttcaaacattttcagaaaaagtatttccaatcttctgggaacaggtattggttattactacagcaaatttgcctaatcagcatccttctatcttcctgaacttgtataatgtgaatagtcagttggccacgggccttttctatgtatctttatttttccaaatgcaggctagagaggcatcccctgtctgaacacggctgggtggtacagggcaaagttgcaaagagtttgtaaacatgggcaaacttctactcataaactagatctaaaaataagaaaaaaaaatacttgccccatctgtgacacatggattcttgttagtttccatctctgaagtttgcctcttcctagccataaatagagttaagagtccatcttcccgctgggtgttggtggcgcacgcctttaatcccagcactcgggaggcagcggcaggaggatctctgtgagttcgaggccagtctggtctccagagcgagtgccaggataggctccataagctacacagagaaaccctgtctcgaaaaaccaaaaaaaaaaaaaaaaaaaaaccaaacaaacaaacaaaacctcctgtccaccaactgaaataatgttgaaattacttgacagaagaaaaaagaaattgttccaaagtcccgtgaaatgtttcaaaagttctattcataagtttttcaattttacttctattttatgtgtattgagtgttcttctgtctgtctgcttgtgcatcataagcatacctggtgttcaaggagatcagaaaagggcgtaggctcacctggaactggagttagagggggctgtgagctgccatgcgaatgctcagatcgaacctgggtcctctgaagaacagccagtgctctgactgctgggccatctctccagacgttgttcataattcttttaagattgtaaatgcatgccattggtatcctttttaaaatttaaccattgcacttggaaagttgttgggaggttgtgtttgggtttttgcttgcttgttttgttttctgctgcccacttgtgtgtgtgaccatgatgacaaatctcagttgccagcttgctacacctggaatcaactaaaatccaagcagctgggcactcctgtgagggattcttggctggatcatttgaggtaggaagacctgtaccaggatttcctttaggccaccaaccagctcccaaatcatgacatagaaacctgttattagttatgaatgcttagcccagcttaggctcatttctggctagctcttttaacttaaatgaacctgtttctttttatttgccctttgcctcggggcttttttacttttctttccttctgcatgtctttttttttgcatttttttattaaattattaatattttcacatgtactttccctctccctttccctccccccatccccattccttctcccccacctccaacctaccccccaccccatccacccgccactccccaggcagggtagggcccccaaccagggctccaccaagtccaccaaatcttcctgtgctgggcctaggcccctccccatgtgttcagagacagagcgaatcccttcaagtgggatgggctctcgaagtccctcccacccaccagggcaaaacgccagtccacctccagaggctcccaggagtgcaggggcctccccattggcatccatgatcaggggctggattagtcctgtactgtcctccctaaagagcatctggggtcgatatgctttccctttttcaggccaactgtttctgtgggtttctccaaccaggtacagaccccttcgttcttcattcctccctctcttcaactgagttccagatttcagctcagtgtatttctgtggatgtctgtctctgctctcatcagccactggatgaggattctagaatagcatagagagtattcatcaatctcattctaggggaagggtttctaggccatcctctcctccactgcccagactgtcagatcgtgtcatccttataggtctctgccttctgcatgtcttattttaactgcttctcttgtctggctcgatggcagatgcctggcttcttgccctgggcctcatttactccctggttctcttctccttcctctagaattccctttctatttattctctctgcctgactgtctccagttcgtctcttgcctagctattggctgttcagctttttattagactaatcaggtaccttaggcaggcaaggtgaaacaacagcacatcttttcatagttaaacaaagacagcagaaacaaatgtaacacacccttacatccttaaacaaatgcagcagagaccaatgtaacacgcttttatacagatattccacagcacaaagaatacagcacatctttacatagctaaatattccacaacaaaggcccaccctaaatctggggtggcgagattcatcctaaatctgtgccatgccatctgatggcagcccacatacaaggatgtgaaagaagggagctttggctttatacccacttgccctcaccttgctggcgagttcatctatcctgctgctgaggcattcctttgctgctatcagaacccacttctttgggattctactatagactgaaggacagctgagaatctggccttttggactggacaaatatcacattcctgcctttctgttggataacagccatcattagattagctgaaccacagcctgtgtgtcatgcttacaaatctccttttactatatgtagatttactctatccgttccgttcctctagagagccttgactaacacagtgaccacgaatctgacctatgaaatatgagcagaagttatctgtgtcacttgcaggctgaaaacctttccttttgccaaggtgctcagtatttttctggttagaagccattccactagcttagatcctggagtaaaacccaccaaagtgcagcaaccaattcaccatgtgcatagagccagcgtgagaaaagaatcttggctgtttcaggctgctgatgggtgggggctgcagcacagcacggcctagtctaatacagtccttgatgtagctctgtattatggagacctgaggcctcaatgtagttgaaaacactggacgactgctaactgtgaagcagcccagaggcaccagccaggtcatcattctgtaactgaaagaacaacatgaacctggaatctcggcattgaagagactgaggcatgagaatcaagaatccaaggctgacttggactacataataggaccctgtttaaaaaaaataaaagaagatagctgaggaaggagggagtgttgcatcccctgtggcttgtggcctgaaaccctggctaggggtagtgaaggaatgaggaaaggacagacaatggggttccttaaggctactgctggaacattctgtgtcttcattaggtacagcacaggggaggggccagctcgtctctgtaggaggtctctgtagctgagcagtcttaggctgtaaacactcaggaggaggaagccgcagtgtttttacaaacaaacactgactaatcatccataaactcatactcaaccccctaaggaaagttttgccattcctcaagccaggtccatatgggtaatggttttgccaatttttcagggggcaattgaccttgaagttgtcagtaggccatgcccatctcaaaatacacattcactctagacttcacccattcgggacttcttccactccctacaacattaatctcagtctgcagttttgctattaattataaatggtatcatgcttactcagacttgcagactgtaggatagactgacttccatatgctatccaactataggcatctccgtttatatccccagactgtggtcttccatgcttctcacattgcctcaatggatagggaagcttgttttaggtgacacagtgggtttcatcttgctttgttatatacagagtctatgccatcccttctcttagaactagattggttatttgagtacatttaatgtctcattttgcaaattcctgatatgccaccttctttactcagtgaaatattttctgtagtccctcagagagattatttctagaccactctctttccggtcatcttctctgatactccaataaccaaaaagcttgcactaggcatttattatttaccccaccacctactcccaactccactgccttccaagctgggatttggtggaatggaatccctaacacaataaagcagagactataaaaggtaatggtcctctatgtgatcaaaactacactcagaagaaagaatgataggcctggacctgaaataataagaaaaggaaaaatcaccgaagtttgcccttagggagtattggaaaaatgggctggtttattgtctaattttcagctgggtgattttggggaccaatgaagacagtctgaagggcaaacagctgcagtgaattccaagaaatgctaaaacgtgtttattggggcgggggtgtaagatttctagaaacagtgccctcttgtacactgggtctgtgctggagatgcctcgcgtccaccttcgaggcatcatcactttctgcctttggtttggagccttgggaagacctcaagcgcctcaggctggctggttcctccttcagggcccctggctgaaggtctgcttgcagaagaaaaacgttcagctggggccatggcctcgcctgatagtcggctgttggcccagagcagccctatcagtcatttgcacgcagatgacctttgggggaagggaaggaggtgcaggcttgaggccccagcctttcactctggcgtgacttccaacatcgcaaaagagacagctctcagccaagacaggtcttcagacggctttgtgacaaaaatgggttttaaaaggttagtcaaatttaacactcataaaggaaatggctaacagaaattataggctagctgctctcccttgctgaaatggcagcttcatttgtgtctctgagtaatttcacaacagacagtgctagctcacagaaggtggaagctgggacaattaggaatgcctgtccagtcccttccttacctatccagacctttctcgtccaaagcatgccttcagaaaccaatttagtcgtacaagtgagagtctgtagacaaaattaagtatggaaaaaagaaaattcaaccgtgctgcctttgaggcttaaatgccagtaaaacgtttcctgggaaagcatttacgttgactcagcgccacctgccggcaggttggatcctagcaactgaggacagtgtctggcatctccatgtaggtggggtgggggcagggcagctcatttcacccattcattctgaactcgtaggtgaagtgccaggcactgtcctcagtgttgcagtacaagaagtatctctgccctgtgtagtgtggtacttcttagtttggccaaagttggagtcttctcgggatgaaattcagactttcagactccgctctgtaggtcctgggagctgggtgattctgggaaacaggaaatcaacgaggggcagtttgagggggaaactaaacatggagaaaagcaggaaaatctgcaaaggcatcggggcctgggattccgctgcatctgccagtagcatgaggaccacgggcagcgagattgacagcagatcttggggaaagaagcgtcaagagtcctgagtagagtgagggcaaccagtgaggaaaagcaggcagggctgagtgatggagccgctggcaggaggagtcagtgatgggcctgggtgggagacctcagggtgcctacaggtgacctggcttgtgtggttagtggacagtgggaggggaatagctgggcagagggggacaggacaggaggagaagggacacaaaaggaaggtggaatgtgcctttataattgccaccgttgtcccgtgccatttactatgtgatctggatttttcctttcacctgctgtgtctcagttatcatctgtgagacacagattatattactatctcccctcacggtattgctgtgagttttcaatgggttaatttattccaagtatttttttaaggagcctagcatataaatggtagttaccatttcaatacgtggttatattatttataataaattagggatatgcttacaaattatgaataatgaggtacaatgtaatgattacatagacacactatcctttttgataaataagtatataacctattataataatagattatttacaatgctattaggtgtcatttcattagcagcacacatctctctcaatccgaatctgccactccctgcctgttttagacggttgctcccatggtcctctcccaagccttgcgctagtacaaccagaaaaccatccttaacagagggacggctcatggctgttggtgaccaacatcgtgtcagtggaggtgacatgggatgagactctgagtatgcaagaaagcttggccaactcgtttttgcttatgacattcatcagtgatgcccttgtttagacctagactgaagaagactgcaaaacaaacctagactgggcctgcagccccaatcctgaggcgccccaccaacgcatagattcatcagccaggaaacaaatgggttttgctgtgggccactgagataagagttactgttgcacaatgctattaccacttgctggagatgggtgttcagatccagagacacagacaggagtctagacccaggggtcaaacaaggctttttatttaaaattaggacatctagatgggagatgcagctctcctcaagtccgggagtggctccctgaagaaaggcagctaacatgtgaagagacctccaaaaggttcccatttaggtcctctagctcccaagacggttctccacctcccttccatttggggatttgctttttttgttgttgttgttttgctttgtttatttgggatagggtcttactacgtagtcctgactgatccagaactctttatgtagagcagggtggcctgaagctggtattgatctccctgcacccatctctctcccatctcattcagttctgaactcgctatttatttctcccaaagtgttcaggtttggctgtttgcctacgagaccatctcgaggtgttcatctctgaaagtgctgacacagttgtctaaatggtcatctttaacccctgatttaaaggttgagaagggaatgggagggagggtggggggtggttctcagtggatcacacagtttgcctacagtgactatttgtacaagtggtctcccattgcctggatgatgggagtggctgtaccatgagcttggacagccatggtctctgacttactgttgagagaaatgaggttcagatgaggttagtgcttgtcccgccctgctaacaagttactcagtgaaccagagcttgccaggctgtttccatttggcactgtgtgtctttgcacctcacgtagcttgagggaatcttgaatgtagtggaggctggaattagagacttaaaagagttgctgattatgtaaaatgcttgtccacagacttcttttccttctcacatcccatttctgttttcatagtgcttactatttcattgaaggagaagacagcaggtgaaaggcgggaagaaaaggactctgggaaacaggacagaaggcatgccagtatgtgtttagcattttacatacaaaatctatgcaaacctcccaacggccccttaaggtgttacacccctcgttccataaacctgaagagtgaagcaaaaagagtgtcgttatcttgctccaggcctcccagcttgtcctgtatgatccaggaacttgaatttcaagaaacattgccctcagaggagcacttgagattccctctaaggaatcaggacctaaactatttaaagaccaaaacacaaggctggagagatggctcagtcaacaagcataaagttctatctccaaaacacacataagaaaaccacccatggtggtgcatgcctgtaatcccaggccagttctgggagagtggagacaggtggatccctggggtctgctagctagccaacttggggagtttcaggccaacaaaggaccctgtccctccctccaaaacctgagtagtacctgaagaacatctgaagtagccatctggctttcacacaaacacactcattatcagaactcccccccacacacacacacacactccagacaagggtttctctgtgcagttctggctgtcctgacccttgatccatagaccaggttatcttcctgcttctgcctcccaagtaatccaccacccagctgccttccggaatctttttttaaaaaattttttcggtttttcgagacagggtttctctgtgtagctttggagcctatcctggcactcgctctggagaccaggctggcctcgaactcacagagatctgcctgccttgcctttggagtgctgggattaaaggcgtgcaccaacacctggcttttttttttttttttttttttttgagacagggtttctctttggcttcagaagctctcctagaactagcccttgtagaccaggctggtctcaaactcagagatccgcctgcctctgcctccctagtgctgggattaaaggcgtgtgccaccactgcctggcaccttctggaatctttaacataggtatgactttcagttcttctgggaatttcagtttcgctgctttaaatatatatgatccatttagcagtatacagatgtttctcacttgttttcacaagtgcataatattccaatatatcaacagaccattcacagccatctgtgatgaatagattttgggattccaagtctcccattatttcagtcaatgttaattgaatggctttcaggatgcttgtgtgtgtgtgtgtgtgtgtgtgtgtgtgtgtgtgtgtgccaagagccttcctttcttttggaggcagaggctctctgtgtagcccaggctagccttgaactcacagtgttcttgctttagtcacccaagtgcaaggattacaaagattacaaaccagtaccaacatgcccattttgctggaagatctttgagatgagagtcctagaagtagggttttataataacaggtgagtatccatgaaattttgctaaatagtatcaaatttctctctccatgtattgtgccatttttcatttccattaacaaaatataaacaccagttctccactgctttctctatacatggtattcttcacttccagatctgtgctaacctgacagttgagacagtaatttactgtcagcggtggcaggtcttaagctgacacacagcgtcacgctgctgtttgtggtggcctgagcagttgttttcagagttctccgtcccctcaggtaaagctgagtcttgacttggctgcaggaaacaatgccaggatgagccgattcaaaaacagagctgcagtttattaaaagagacttttcccccagtcatcctggagagtaaacctaaggcctcacacatgccaggcattcattccaccactgaactacatctccagtcctaaaagagattttaatatagattaaaacatgtagaggagtaacagagaagacttcagagaaagagtcagacatacccaagagtgtgggtgtttccttctcaaaagagtcattgtctttatgacagctatatgtgtgtaggagtttggcggctaaaaaataagttacatgacatttattgtgtgggggtgggctaggggtgcatgttgccctaatatgtgtggaggccatggtacttctagcatgagtcagttctctccttccaccctgtgaatcttgggggtcaaattgagcccctccacctcctgagccatctcactatccagatttaggtgacttttggtgcttttatctttagtgtgctgcaaggaatttgaacgtgattagaggatgggtccacagatgctccagacaggatcaaagctgtaaaagcctggaccaaaagagttgcttgggaagttcactgtaatgccactgtcttgtttgtgagatttccaaaaaacatttaggaaatgaaaaggtctttttgcaaaattcacagaggttcatgtcctgcacatgagttcattactattttaacaatgttacttgaaaatacctctgtatacaaggaatagtacatttatattcgcagccttcacagcaaaggttaatggtgctggtattattgattcttagctggtgagagacttcaacaaggctccataatggagggtttattttttcccatgtccccttaatttccagtttttctatctttactcaactacagtttttatttacatttatcttattatgaatataactgagcatcttttaacacatttttttttttacttttgcatgtacaggtacccttggaggacagaagaaggcatcatatcccttagagctgaaattacagacaacaatgtgggtacaaggaaacgaactcaggtcctcagtaagagcagtcagggctcttactggctgagtcatctatccaggtctctctctctctctctctctctctctctctctctctctctctctttctcttcctctctctctctgtctctctctgtctctgtctctctctgtgtggtggggggaggaaaagtttattttttctttcccacccttctttcctttctttctttctttctttctttctttctttctttctttctttctttctttctttgtgattgaagatactttgaaccttttccctttttattcttattttatgcatatggttcttttgcctgcatctgtgtctgtgcaccttgtacctgcagtgctgaggagcccagaagagggctttggattccctgggattggagtattagatggttgttagccaccatgtgagtgctgggaattgaacctggtactctttcccctgagagcagccagtgctcttaaccacagagccatgtttccagctgcaacacttgaacttttgaacccccttacttctgtgtgctaccatgcccagttttcatgtggtgcagggcattgaacacagggcttcatgcacactaggcaagcactctgacaactgagctacaccccagccctatttctttctttttcctttcttcctatttttcttttcttccttccttccttccttccttccttccttccttccttccttccttccttcctttcttctttctctcctgctcctccccttctctccctcctccccactttctactcttccttttcttctctagactgtgaatgggcttgtatctctgtcctgccctccacagttgcttttcctttacttttagcctctaaaggacctcttttaatgacattagcagcattgcattggacctggaactgccagcacacaagaactgcttgttacaatttcagcaattttattccagctcatatagcatcagtattgttggtgtcaagttacaattggctgtggtagcaccatttactctatgggagttggaaaactataaactgcccctaccaggaatatgctactggatatttaacccttccacacacaccctcctttccccccccctccccacagggtttcattgtgtaacatccttggctattctggaactcactctgtagaccaggctgacctcaaactcacagagatccacctgcctctgcctccctagagctgggattaaatgcgtgtgccaccattgattggctaacccttttctataacataaattggaaaatttcattccagtttttcaagtctttttatttttctcatgatatgttttgctatgcaaaaattatattgctttgttggtttttatacttcaaagtttgatcttttctccattttctcgcatccatcacaaatttcatagaattttatcacattttcttctattatttatgcaatttcatttctttaaaaaatttgaggggcttcaaggtatggctcagttagcaaacacacttattgcgcaagcatgaggaggacttgaattcaaatttctggcacacacataaagaatacctaaagccagcagacctgtagtgggtggagatatgagtattgtcagagcttgttgggagccagcctggctccaagtccagtaagtgccctttctcaaagaagcatgacacctcatgtcctcctccttacacacccctgtgcacagcacagccacatatgtacacacacaataaagaaactgaggatataacacagcaggagagcacttacctaatgtacaagcccctgggctcagtcatcagtgacacactcaacccacccaactcctcaacatgccaaattaaaagattccagtgtagatatatagcctggtggtggtggctcacgcctttaattccagaacttgtgagacagaagcaggtggggtgggtctctgtgagtttgaggccagtctggtctacagagcgagttccaggacaagctccaaagctatagagaaacgctgtcccaaaagacagacagagagagagggggcgggggagattccatgtagaatgtttgccaggcatgtgaacagcattggattcagtccctagcacagcaaacaaatgaaaggaaaaaaaaataaacatatggtctttgattcaagtctcagaactctgagatcaaggccaacctggtctatatttcaagttccaggacagccagagctacacagtgaaaccctgtctcaaaaacacctccttctcccccaaaataagattgtttatttctctgttagctaccccttcattccaaggttctttattatggtctcctcactccccccctcattgatatgagatgttaccactgttatcatgtactaaatttctagattaaattaaatttacgctgggcggtggtggtgcacgcctttaatcccagcactcaggaggcagaggcaggcagatctttgtgagttcgagaccagcctggtctataagagctagttctaggacaacctccaaagccacagaggaatcctgtttcaaaaaaaaattaaatttacttttgaatttcctatgcttttactcatgtgctttgactgtttgccctagtaaaatcaaaacaaaacaaaacatgtcaacttaattttttttttttttttttggtttttcgagatagggtttctatgtggctttggaggctgttctggttctagctcttgtagaccaggctggtctcgaactcacagagatccacctgcctctgcctcccgaatgctgggattaaaggcgtgcaccaccaacgcccggctaatttcaagagagttgttttcttttttggcaacttaatttttttatttttatttatttatttttagacagggtctccctacatagtcctgactgtcctggaactcactctgtagactaggctggttttgaactcatgaagatccatttgcctctgcctctaccttctgagtattgggattaaaggtgtatgtcaccatgtcaacttttaattacctttatttaattttatatctacacggggtcttgccatgtagcacaggctgacctgcggatcacctacatcagcctctctgtgctaggattaggctttggggaatgagacatcgggacagctgctgagccgtggaagctctgctctcctggatgggcttacagcttttaagtgctttggggcctgtgttctccactcctgctttgcacagcatggtctccaccttgtccctccactacctgtgtctactttgatcttgaattttgctgcccctcaaatgctaggattaaaggtgtgtatcaccaccaccctactgaatttatcttttagaaagacacaggccataatgatgtggaaaaccaccagcctaatcaaatgaagaatgggaaaagtaagctcaaaaccaaagtggggctggaggttgtgtggtattcactagagatggctgctcacacttgggtttaagccaacagaaagtctttattagtcaaccggcaagtacactgggtgctggggagctcagtgtagccctgagccttattcgggatgagcttttaagccaaaaaccatgttctgggtagacatactccagtggacaagagcagttagccagaaacagaactacctaagtgaaaaagcaaagctagtgcatttatagactttcccagaactatatggactttgatggatcaggcctttgttttagttttggcaggcagtgctgtctacatgctgagttttacagcttaaatgaaatttccatcatggagtcagttgtgctaaggtctgagggcctactaaagtctggggccctgctacaaaggtgaccaagagctctcctaaggctagaaggaagcctggtgctatgtcccatgcactgggagaatgacactcccacccccaacatacacagtaagtatgatgatcaatgccctgtccaataaaggttcattgtgccaaggtcttgtggacagaatggctggttccctgcccaaggcagtgccaggattctgctctgagtctcctggatcagctggggctcatatagccatagccacaactgaggaaggttcacatggcaaaccttcatggccacttggtgctaatcttataagctcacagatcacaaaagctgtgatgacatagctttctcagctacatttcaaaggtcagaggttaaataggggggcttgtttctccccttccaccatgtgagtctcaggaatcaaactcagcttgtcaaactccatatcaagagcctttacttgctgagtcacctggctgcccccctaacacccccaaaagaattccaaaatgagtcatcatgaagcagagctggatttattaagtgatgatagtatacactgtagatttaagcatgggaatttaaagagaaacatctaagtgtcttaactaagtatgtgtatgtgtaagtatatgtgtatgtacatatgcgtgtgtaaatggtcttgtggcttttgatgtgacattgccccaaggatgtaatttacaaccagtttacaatgaagttcaagatttagcaatattaaaatttagtgcagttttaaaattaaggtagaaaatgaagtggtttatgtatttcttttattttaaaatttttttctcatttaaacgcaccactaaggtggtttatgggatgtgctttcaggtttaaggatcagagaggagttctgataaagttaaacttcaaggtcacagacagttttggctttaagaaaagatgtggtgtttgtttttctgaacattcttggagatgttgctgagaaaaaaaaaacaacaaaaaaacgtggctgtctctgtaggcaatcttccctgattttgtcagttgcgttgatgttcttgactcttagccagtgagaaatgtagaccagattctggagggtggggctttgggttcttctcatgtcctagtaattccttctgtctttccatcttgcctcagcatctctgcgccaccattaggagaactcttagtggaatcgtggagttggaccacctctgagatcccagaactacagaacagggtttctctgtgtagttttggagcctatcctggcactcgctctggagaccaggctgacctcgaactcacatagatccacctgcctctgcctcctgagtgctgggattaaaggtgtgcgccaccaacgcccggctatttatgatttattaaagcttgcctgaggattcagaaagcaaagtcagcctcaaactctagagatcaggcagtggcagtacacacctttaattccaggactcagtattaagaggtagacagataactgttagttcaaggccaccatgggttgcacaagagtgaagaataacagagctcatgcctttgatcccagcacctgggatcacacacctgtaatcccaacattagggaggtatatcacacaagaacagggtctcagaactggcattcattctccccccacattgaggatagaaagacattgagtctcaggattctccagccacatcgagaagagcatagcagtctgggatttcagtctgaggtttggtggagccaggatcgccttgttgtctgaggtagtggtaaaagatagtgaccagctgctttgcttttttgatcttcagctggaagcttgaaccccaatgtctgtctctggatcttctatttattgtgctacacttattgtcagggaccaaaaattatctattataaagtttcttggggtccaaacctctgctccatattctaggagcctgattctcccattgtcttccagatgctggctaaattgccactggatggcttggccttggagaatgtctcctagttgcataactacagaccctaggtgtgcccactcctattcaaagaacttgcttaagtacctagagagtgtttagttgcctcttgaattaaaaaaattactttgtaggggaagttgtagtttaggggctggctacaggtatgccttaccatgcctgcaagggcgtggtcagggtgatgtaaagtgagaggtgttcaggtggctggtttcggttttggtttcacttttgggttgctgtacagactgctgcctgccggctggctaggtcactctataagtaaggctttttccctattaaaatcccttgtatttctacctggctctgtattggtaatttcccacattattacttgatatcagctatatacatgatagtagatgccttctgcagccacccccactgttggaaagctatttaggaggatgctagaataaagtagagacttcaacttccagtatggactgagagccctcctgaaatgacaagaggtctgtgtctggtctttattgcccttgggtagctaggagtttccaattacagcaacccacccccatcaccccccatcaccccccattatccccccactcagagatggctctggggccatttgactgcctccagtctcagccccagagacttcagtccggaacggatagcatgggactgataaaagccgggccccaacaacctctcttcttctacgacatttcttgagacttggggaggtccatagagatgtcctgtttagaactgaacactcaactcacttttctcagcccttttaagtggttaggagtctcttcatggactgttgcccatgacacaaagaataacgcagtttgacaacatgtccatttatttaaaacaacagcagcagctccccaccccatccccaccccacatggcctataaccttagccataggcttttgaccaggtttattgtaacttgaatgaatcacctcttacggagttggtctcaaacccaaacaggaagaagtgggttacttccataacaatcattccattattgccccagaagcccatcttgtctggcaggatatcatgatgcaatcctggctgggctggaactcacaaagatctgccagcctctgcctcctaagtgctcagattaaaggcctgcactactactgccctattgtcttatatatcagcagtagctccatcctgactctactctccccttccttctagattcttctttgtggcatctccagacacctgccattctatatatctttgtgtttgtgtttatctctctccccagcagaatgttagctcaagagaacaaacaagtaatgcatttcccttgctcaggtctgtgttggttgtgttgctgggcatcatagccagccctccgtcttcatcagggaagcactctaccactgagctacattccccacacctttttacagcatggaaactcctctctttggctaatagtcactgaggacctgagatttaccaacagcaacatcaggggacttggaggtaaataccccctaggttgtggttggagaagatagtagccacagccattatcaatatttttgctgtagcattttatgagaccctgagccagaggtacctggctgagcagtgcctgtgtccgaattcctggtgtatggtaactatgagacaataggtatcagtgttttgttgttggttttttgagacagcatttctctgggtagtcctgactgtcctggaactcactctgaagaccaggctggccttgaactcagagatactcctacctctgcctcccaagtgctggaattataggtgtgcaccaccatttcccagatagctattatttaagttactgggttttgggataattagttagattgcaatagatagctaaagagtctctgagacagattattctattagtggtttctcatgaattgtctttgtatacacacacacacacacacacacacacacacacacacacacggcttggccatgggacttgctttggccaatgaggtatcggaagaatgaggcagcaagagatgtaggaaagatttacacatcaacacatccccgggccagggaacccagactccatagattctgtagatctggaaactgacgagcagatggacaaacaccaatctctccaggctgttccagccatccagcccagtgggtaagccagtaagccttgaggaaccagtgtgggaaactaagtcatgctatgctaagccagcaaaggctagggcggcctctaccataataggtagcagacacaccctcctcttctggcttctttccagtctctggtggcttcccagacactgaacctgtctatcttcctctcactcacctaactcatgctgggacaatgcgctcttatttctggaacaagtagattcatttcctaggcctgctgtaacaaattgccagggactgggttgcttacaggaaagggatctttttccctcatagtttgggagattttgagccaaaaccaaggtatcagcggggctgggagttctggaagggcctctaagaaaacagttctatgtctttctctagacattggtgttgctttgctctttggtgtcccttggcttgcagctcttaactctagcctcttgcctgtgaccacatactattgtcctcatgctgtcacattgcatatgataaagagaatgactgagcatcctgatgtgatctccctaactattctgttacagctcttctccagatcaggtcacatgctgaggtactgagacacacctccacatttgggggagatagagctcaacctataacacatacctatggtccctgctccatctactctgtacattctagggttttaagatattccagcatttggtgtcacaaaacagtaacccttagtctttcatcaacagacatttattgagtgcctactacacacaggacactcatctgagctttcttcagtacaaatgaatataaacatttggccatatgcagtttgggcgcccttgctagattaaaatttaaattaggatctgtactaatttcgaatactgtcattaacaatggtacaagttaaatagggaaacaaagactcatgtaaatcaatgctcgtgtgtggtgaaatggctgccctgtgcatgcttgccaggagacttcccagtttggcagcctcttacccctctgtaatcaacagcattaagcaaagcccaaactggcaggcttctatgggccagttaacgtgaccacacactctgctttccatctcaaacacctgatgttttatataatcctgtgtttgcttctatcttctacccccaatagaatgttagctccaagagaacaagtaatgacttttgttcgggctcgtgtatgtgtgttgtggtgctgggtgacccttagctgttccactcactgtttgtttgaacattttccccctcataacccaaaattccaaagatttattttcaagagagggctgaaaccacaatgttcccaacttcagagattagaaatgttttctccaccatcaggttttctggtcttgcataacctgttcttgcccagacctttccatgcttgcctgtttgctaactcccttcctttgcttctcttgggcctctcttgtgcttttttcctaaccccatacacaggcattggctgtttaacttaatcatctttattctttctcgtgcaataataactatgtaagagccactttttctttttaagtgcagggctgtctgcctcaccttgccacccagatcaggtcctctctttgagcaagtaaacctcccttgccactttttttttccggaagtaatttctacttagaaactccaagtagttttgaacctgtcatttggcagcctctgacacatgttgttatgttttagagactcctttctgtcctccctgcgtccagcacaagaaaccataccacatggacagtgggcaacctcctctgagcactagcccagtacctggtattgcacaagcaactcatatacctttggactgctccacactaatctgtgtccattttatagataaaatgctactcaattacttctcttctgctttttcttggagcatgccagactttgagcagttgggccttaccttcgccctagtgcattcttctctgtattcagctcagtgtatatattcagccagtgcctcaccagcatccctgctacctgttctaaaacagctccctcccaccctcccgccccctacaccttctgttcttttgcttgtttttgttcttgttactgttttcaagaaagggtttcattgtgttgccctggttgtccaggaactcactctgtagaccaggctggcctcgaactcaacagagatccgcctgtctctgcctcctgagtgctgggattaaaggcgtgagccaccaactcctggcctgccacctttttttttttttttaaagattttatttattatgtatacaacacaacattctgcttccatgtatatctgcacaccagaagagggtaccagatctcattatagatggttgtgagccaccatgtggttgctgggaattgaactcaggacctctggaagagcagccagtgctcttaacctctgggccatctctccagcccaaacttttttttttttttttggtttttcgagacagggattctctgtggctttggaggcagtcctataactagctcttgtagaccaggctggcctcgaactcacagagatcctcctgcctctgcctcccgagtgctgggattaaaggcgtgcgccaccaacgctctgccctggcccgccacctttttttgtttatttgttttgtttgccccctcccccagcactgtttctatcggtctcgtttgcttctgcctctagacttttaaacccgccagcagcaccaacctcggttttgttcagcacagcattctgagaggcccttaagaaccgtgtcaaatcgggcgttggtggcgcacgcctttaatcccagcactcgggaggtagaggcaggcggatctctgtgagttcgaggccagcctggtctccagagcgagtgccaaggataggctccaaagctacacagagaatccctgtctcgaaaaacaaaacaaaacaacaaaagaacggtggcaaacaacaggcactggataaatattcctgaaatgaatgtatttccaaaggaactagtacttgtgacctctgcatagtaacctttggttctgggagataagacacaccgttcacagacctgggacagtacttcacttgttgagaacttcagtgagaaaggttcaaggtcaccctgggagaaggaaatggggtgaaaagagagagggaaggggaggtatgaaaaggtgtgtgtgtgtttttggggggggtgttggcaagccgggggaacagaggggccataaaatgggacaccctgcttcctgttgggactgagtaggacagggcctgactcttagtaaggactaagagtgaaaaaagatgaatacagaaaatgaaatccagccacccagaggtgccaaggagcgactagaagtagaaagggactctcagaggttgcccaccggggacaatgcaccgggcacagcctgcgggttgggaccaggcagcatagggcaggaaggtctggggatgccaagaggcgtggggtggagccgaggggagtggggtgcggaggggcggtgcagcagcaggcggggcggccccggtggccagcgctcacttccgggagagcggggagctgtggccaccgcccgctcgcagctgcctgctcgctggggccggggagcccgtgagcgcgcaggccaggccgcagcccagtgtctgtgcagctcgggccactgtccgtcaccatgggggcgtcggggcggctgctgcgcgccgtgatcatgggggccccgggctccggcaagggcaccgtgtcgtcacgcatcaccaaacacttcgagctgaagcacctctccagcggggacctgctccgccagaacatgctgcagggcacaggtgggagctgcgaccaagggctggcagcgtgcggtcgtcccgcaggggctttgcgggccggggtcgagggtcttgcagcgctccgctccctgccgtcgcctggggaaacagctgcggcgctccgaaacctctggcctcggtgggcagcttcgggtagattgcgggggtggaactaagaagttcaaagacagaaggaaagccctcggctttgttcgaatggcacatccgaccggctggcagctactgcgggggtccagcctggggaactgtgcccggctctccacgtgtccttgtatgcggaaggcaggctttggctctgccccagttagcttttttttttttttctacactccccctcccgcccttggtaagctccgtgggatcttgtagttctgatctttatattttcaaggtcaagtattacttatactctttgcagtcacaaaattggcttagattttgatgcccccagacatttctcgggcacgaagggtatccttttgcactgttacataaatgattgttgtgtttctcctgcccaaattgttctaactcagcataaaatctactcaacaaactacactttacagtgggtgggtttgtggtaaattctactctaagaaaagcattagaatttttttttttgacacagtgtcattcaatgtagccaaggttaattttaacttaaacttgagatcctcctgcctcagcctccctagtgagttctgggattaccaggcactagccaactagcagctgtaggctatttttaaaaagttaacaccagatgttttctgcaaaatagcgttgaccttcagttcctaactagtgcctattttgaaagtcgtttgaagcttatttacatagaaatcgtacctgttcaagataaaagaaaaaaaaaaatggaaaaagtaaaggtcctacagcgaagggaagacagaaggaaagaaagtaaaaagcaaagctttctcttattcctgcccctaccctgtttttcagagagaaacaatgcatttccttctgaagtatctctgtgtacaggcacacgtgtatatcctctgtggatcatgttactgtgtatttactcagcagccgttttcacactctgatctcatccgacacccatatgtccattaccctgtgtgtttaaccaccagtttgctgaatctaccgtgatttatttaacctgttccctccctcctggtgggtgtataactaatttccagaaaagggtgcttttttgcttttgtttaaaagacactgacattcaaataggggagaagaaacccaacccactgttttctgtctctctggttggctcctcagcacccctggagcatgttttcactcccttctaatgttgactttaaaaaataataaaggttgtagttaactaaactttatcaaaaggttgtttgactcttgctacatgtccccagtcctggagactgtctgattagtttgctgctatccaaagtacagaagactttaggaatgacctgtaggctgagtcagcgctcacctgattgtggatggcaaagaatgcacactgctgtaggaaaatataggacattttaagagtaaatgaaaggaaattttagaaacagcgctccttgattcactttaaacctgttaaagagttaggtattgaaactctgtaacatggaggggtacacaaagatgttcagcggctcattctgtacgttttttttttttaacttattcattttcattttgcatgcattggtgttttgcctggatgtatgtctgtgtgagagtgtcagattttggagttacaggcagttgttagcagccatgacggtgttgggaactgaaccccggtcttctggaagaacagtcggtgctcttaaccactgagccaacactctagcctctcattttgtagttttagtgggtagctcttttcttttttaagacacggacaaatactttctttaaactgtaaaaattcattatcagaagtaggtggttatttgttttaacagggtctcacatagtacctctggctggtcttgaacttgtagcaatcctcctgccttaatctcatgcatgttgggattgcagatccaccaggccctgctagaactaagatttgttgtgagagaagtctttgcaggtcaaagttcaaggtacacacagcgggttagtctctgatcagctgggaaaaggtacagatctcagagggaagccccagccaggcccctaaggatggtttacactgagtctggctcatctaactgatgcctgaaatctggaagtgggaggtcatgggatggcggggtcacttattcttcaaagaagtatgggcaattccttaacaggaacacaagaagcagcttgtggggcgggtcatgagatgttttcacagatgttaatagttcattatgcagaatagtttttcactaaatggtatccaacaggtcccgtgggtcagggccgagaatatagtcccaataaatatttgtgaaaggattggatatttcccacagaaacagcctaggtagaagtaatctttaaaaaattcttagaaagggctgagaattcagaagaggaaactgacatcctgtaagttgacctcacagagacatgattgattagtcttttggtgtgttctcctttattcttttctgtctccttgttgcatttgtgtgcagttgtacaattgttattagattcttttttattctcatttgttatatatcaagtttcagtcttaatttcaggaagattgtacactttatttgaactttgcctgttattagctattgattttttatatttatttattgatgccagaaaccaagtctggggccttgtgtatgccccagagctggctctccagacccctactgattggacatttgtgttgttaaccattcttggctgtaataaatactgctgggtacccaagtagcagactgcaactctgcttattttcctttgagtgaattccaagtgtggcatttcgaggaactcaccgtcatttcatgagtgttattttataaccctgactacatagtctaaaatgtgtctggtgggagtaggaggacccagtcccttccagcagtcatcgcttcgcctttacccatttttagacctagaccccttcctcagctctatatttgatttaaaatgcaagctgtgcgtagtattcattaaagccaaaagtgcatgtgagaaaaacagtcatctcaagatagataacaatggctttggaaacactaggtgacctggtgacactagcagacctgagaccctagagcaccaaccaggacagtggagtccgaaggtctgagtctgagacttaccattattgtattcctctcattcctttcatgagaaaaaacgagcgccacggaggttgaagaattcctttctgtactcacctgggcagcacacgtcctgaagctggtatgctacagaccattagtctgggctcagacgagagtgagattcagactcgtgaactccttcccatacacacaaaacccaaaacgaaaataaacagagttttctggggcaccagggtggaaacccaggccccaggtgtcagttatatattctttccacagggcagtacttcccaaattgaggttcatgtggtcattttagatagactttttctttatttatttgccaagaagaacttacattttgtgaacattttttagctcatttaggaggtgcgctgcttaaaggaaacagtaattcagatgtggcagctgtctcaaggtgagcatgtgagtggtagcctggtctggctcattggtgggtgtttcatctgtggtacccgatgagaggaatgaccctttcagtctcatttgctatcatctgtatgttgggagaggctaactcagtagataatcttgagcccccaagtgtcctccatgtggccaggcatcgtcatgtggaccatggagcatagtgtgtataactagacttagattgatggcagaacaggttatttttataatggtaatttgtaatagtcaatgcatttacacggtttggaattaaaaaaaaaaacattgaaacaaatatttagtgaagagagccttgtaagatatttcatgcatacatgacttggcgctaacacaggtccataacgtgcagaaccttcaacagtcaacagtatgctttctgggagtgtcacatttctcccctagcattgtctggcccggatgattcgctgccatgtgacttcagcattatttaaagtgtatgtatgcaaaatccagtgcacttaatgtgtcaccgagttgggtaactgtcaccacaacagacttaagaacatttttattacccacaaaagaagccttatagctatgagtcactcctgtccccacccaccccacctaagcctctggcaatactattatatctttcatttttcatggacatgtcacagaaatgaaatggtagtctatggtcttttctctctggcttctttcacttagcgtattatttttctcaactatgttcatttacttagagtgtatgtgtacttgtgtatgtgtgtgccatggtctgtggaggtcagaggacatcttgtgggtaggtggatagtcactctatcatgtgggttcaggaatccagctcagggtataaagctcagtggcaagtttctttgacctctgagctgtcagtgctgttctgagtctgtcacattgtgttgcccaggctggatatgaactcctggctcaagtaatcctcttacctcagcctcctgggtaactgaaactcggggtgaatgccactatgcccagcttgacttaggcttttaaagatcccctcatgctgtaatattaggacttggttactttttattgtattatatggatgttttacattttgcttagctgatatttgaatgagcttccttttttccattgttttgtatcaaagtcattcagagcaaccttaaaaaagaggcattggttcagaactaccgccataaaaagtaagctgctaaattgctggatttttttttcagtttttcatatacaaaacaaagggttttcttttgatgttttcatgcagagtgccaaattcatagattaattatttaataaaacaccacagctagacttcagaagaaccttgccccttgtctgtgcccacatacccagtgatctgtgggtccattaggcatgcacaccgagtgggggatttcactgaaggtgctcacaactggggcacgtggatgtgtgtattagtcacagtggctgccataatagcacaccacagtctggtggctcagatagcagaattacttttggagcctagaggtccaagatgaaggctctggaagagttggtttgtgatgaggcttgcctttctggaacatctgactttatggcctttcttctgtgctcaggcactcctgctgtctcctctcagtgtttacagtttctatgagatggaggccccaccctaagaccccattcaaccttaattaccttcttaaagataaatagtctaaatatcacagtagaggttaggttcgagtttcagtgtatggacttgggactgctcagtccatagcagtagcaggattagcatgtgacttcaggggagagacagaggagagaggagaggagaggagaggagaggagaggagagagagagagagagagagagagagagagagagagagagagagagagcagagaggcagaggcagaggggagggaggcaggcaggcaggcaggcaggcaggcgcgtgcacgagctctagagtgctcacgacattacaagagcctagagggaaacctggttacctaggaggttgaggttttcttgccttaagtgtcttttaaaataatttctgttttcattgctataaccaaagactagacattgaatactttataaaaaaaagaaaaagaaaagcttatccagtgtgcagccgttgggatctgaagtgccaagacctatgcagctggcaaagatctgtgctgggttatcccatgcaggagagtgggagagcacgtgggtacatgaggaagagagaaacctcggcaagcagttacctaggactcactgccagagaactcgcccagcatcattatctcttcatgagggtggacttaggaaccaaacacctcagagagtctacttccttcaacattgtttctctgggcgccaggttttataatgagctctggctcatgaatgtctggcccccctaacacatacctgtatcttgatttgcttattttggatcagccacatcccaaatcttgtgaagagtcctattatcaatcaaaagaaggagcaaggtgttataatacagcttaaggtggggtcgtgacagatcccatggtaggcgagggacaaacaacacgcagacagagcttaagtgggacgttttattgggagagagggaaggggatagaaaaagaaaagggagagaggggagagagacagagagagaagagacaggaaaagtcttgttggccccttcagaggaactgcgggaaagagagagcagagttttcctcttaaagggacctttgcacttgcgtgcagactacgagtgacatagcagccataagaccctgggctggtcagggtactgcctgagtgcatcctcccaggtgacggggctaacacaagggacttgctggggtttgttactctcctggtagggggagtgcctggaagagagtgcaagcggggaaggaacgaggtagggtgaaggcagaccatgaggaccatgctaggcaagtgctgcccactgccagacctgtgcaactgggctggaattctgtcctgaagcacgatgaggaagcaggagacaggtctggaagaggaaggctttcgagctgtttcaccagaggaaggaacgaaggttgagggagatacattgttttaaaatgtagttcttttttgggggtgggggtggggaagttcgagacagggtttctctgtgtgtgtgggcgccaccaacgccccgctaaaatgtagttcttgtgaaaaatccaatacctgaaagttttataactatgtaggggtagaataagaattaaaaggacaaaaaaaaaaaaaactaattaaaaggacatgcggaggctggagagatggctcatcagtaagagaactgctcctctctcagaggaccaggtttgattcccagcacccacatgtcagctcacaaccatctttaactccagtttcagaggatctgaggcccttctggcctctttgggaaccaggtatgcatgtagacaaaaggaccttacacataattttttaaaaaagaagtggtccaaagaaacgaatgaggtctacatatattaagtacatggaactttacaaagactattttatttagttacttttaaatattcttctctctctctctctctctctctctctctctctctctctctctctctctgtgtgtgtgtgtgtgtgtgtgtgtgtgtggtgtacacatgtgagttcagtaccaggtcctggatggcctggaacttgatatgcaactagatctgggttaaacttggggcagccccactgtcttcacttccctttggtttgcttgttttgagacagggccttctgtagcacaaactgacctcaaccccacatatgtacctggggctggccttgaactccttccttcgggtatttcagttgtgcgccactgtgtccaggtaacctctgcttgtagcagaaaagctgcggataacacactttctcatgggcctgacttccggaaacatcctgtagaaaatggattctgagatctggagtaggataaagcaaacatacttactggcttttcccttgctgtagaaattggtgtgctggccaagactttcattgaccaagggaagctcatcccagatgatgtcatgacgcggctggcccttcatgagctgaaaaacctcacccagtgtagctggctgttggatggtaagtgcacacaagcagttctgctgcctgaagtaatgagtgccagcaggagaaagagcagttgggacaagggacagtcatcaggagggcagtcagtcccctttgagtctaattttaagattgaatcagtgaactgattaacttattttgaggcaaggtctggcttccagtatgccatgtagctaaggatgaactgcaatgtttgatcctctttcctttgcctctcaggtgctggggttacaagaatgggtggacaagcttgtttatatgttgtggtgatcgaactcaaggcttcctgcatgctaggcagacatgctaccaactgagctatatcccaagcccaagggtctggtcctttttttttttaaatatattttttgatttattttcattttgtgtgcattggtgttttgcctgcatgtatgtctatgtgagggagtcagatcttagagttacagacagttgagctgccatgtgggtgctgggaatcgaaccccggttctctggaagatcagtcagtgctcttaaccgctgctccatgtttctagccctgggtctggttctttatttggaagggaaagaggctgttggacagcacggtttctagactactacagatgtaactttagtttcttccccactttaaacaatattctttgactttctaaacttctgttgttttgctttttgagacagtcttatgatgtagcccaggctgaccttgaacttgtgagcctcctgcctcagccccctccccacagagtaggattccaggcctgcagcaccatacccagctgagaatattttgtgctaagaaaggatctgtacaaaagcagttagactgaagagtgacttacaatacactataggcttttcccagccagagtcctggcagagtctcagggcagggtggcttgtatatgctgctttctgatgtaggaggacacagaagaggcccttaaacatgggatactttccttcaagatcaaagttctaattccattttggaagaggtcctgttacttctcttctgtttaaccccattctccaccttcacacatgattcctcagggctgcccactgcaccgcagctcagcttgtttgctagcaggcagagaaggtgtcctagtccctaactgtaaaaaggtcctagatgactcagaaaggtgaagtagagaatgaacaaagggagaggcaggacagagttccttactctggtttattagagttagtatcaggaagaaaaacaaaacaaacaaaaaaacgcttgcccgtatgtccacataatgtatatgcacagaatctcaaggactttaaaaattctcgaaacacttctaagaggtctttggtgtgtaaataccatgctaaagactagtgactgtgtataccaggctgcatatagttattcatgacataaatgttgactaagtgccttctaggtacacaaagctgttctaggcactgaacctaagcaagaacaaaatctttgcttatatggacagtatactctagtagaaaagtttggataagcacagattcagtgttaatgtgcacagagagccatgtgaagggcaggtgggtgcttgtttccctttctggtagaaaatgtggacacatgagtcaccattttatcctcaggtttaatgaagtcttgcttcttcgagatgctgggatttagaagtactgttgacaggtagcctatgtgggtctctttagctgaaggaatggggtacatgaaggttgagtgtggatgctgcccagcacaaagaagtggacaatttcctaagagcccatggccatcagtagagtatatctggggactaggctcaagacagagtaacaggggaagggcctggaatgtggaatgtttgtatttttatttcttcattgttgtactggaacaatgccttttcctttagaaaaactaaagcagatgaaaacgtataagagaagtagcatcctcaatgatcacaccctcctacagcaactatgtttaattgcctttctttaaacaggcattctgtatagtaataaaaaatatacaagtacacaaacttccatccattattagatataagttttgctctccccacaaataatatttcatattatttttttgttttgttttgtttctctgtgaaatagtcctggctgtcttggaactcattttatagagcaggctggctttgaactcacagagattcacctgcctttgcctcctcagtgctgggattaaagttttgcgtctccaccatcaggccttaatattgtttttctttttgctggagtgacaaatacttcagaaagacaactggaaagagggatgatttatttgggcttctagtttcagaattttcagtccatgctcctgcccatgttgtttctgggccttgttgagagtgtgactgaatctgagctgctctctttgtggcatcgttgactgtatgtcaacgatgtatgtatgggttaattcatcaatgtaatcacagccatctctcaatgactggatctgtcaagtggggaccaacacataagcttttgggggatacaacttattatccaaactgtgacatatacacacagagagatacatgctgtgacagttattcttggttgtcaactacatctgaaattaactgaaatccaagcagctggatgcacctatgagggacttttttcttaaatcacagacccacctttagtccagatcttttgcggtgggaagacccacctttaatctggccatgccctctactggcagcccatgagaaggacatggaaggaggaggctttggttctttgcctgcttgcccttgctctcctgctggtgagatcactccatcactagcattagagactatttctttaagcttttggtgtatacggaaaacaatctgagacatccggcctcgtgtactgaacaactacagattcttggaccttcttctggtagacagtcattgttggactggcttgaccacagtgggcagcataggcaaagcaatgtctgtaatggtctgatccataatggttagaacaggcaaagtgatttttatggtggcatgacacatatggacctttggtactggctaatcaatcagtgtttccagccatgaaataggtaagaagcctactgcctttctgtttgatctgtataaatggaagatttctcaaacaaatgaaaggcttcattggatgatggcaaaaggttatcttggcccatgaacgaatttccagacttgagccagtttgcaggcctagaaccctttgaatacaagaatggccaggttcccctgaggaaggaccttgataaaacacataaaagtattactgttagcccttctctagtccaaggggacatatgaccttctacaaggttaactgtacaccgggggaagggaaacaatcagactctctggggtctactggttctgaattgacactgattccaggagatcccaagaaacactgtggccctccagttagttaaagtaggggcttagagaggccagtttaatggaattttggctaatgtctgactcacagtaggtccagtgggttcccgatctcatcccgtggttatttctccagctccagaatatataattgggatagatatacttagaagttaacagaattctcatattgcttcccacctgtggactgaggaagggtatggttggaaagggtaaatgaaatctttagagttgcctctgccagtggaaatagtgaatcaaacacagtaatcacatccctggaggaactgcagaaattagtgccaccaacaagaacttgaaagatgcaggggtgggggccctactgtgtctccctttaactctcctaaatagccagtgcagaagacagatggatcatggagagtgacaatggactatcaaaaactcaatcaagtagtgactctgcttgcagctgttgtaccagatgtggtgttcttacttaagcagatcagcatatcttttggtacatggtatgcagctattgatctagaaaatacatttttcttgggacctgttcataagggccactcgaagaaatttgctgaggccagcagtatacctttacattacagttttacctcaaggatatagtaactctccagccctgtcataaaattaagtgtcataaaacttacttagaagggatcttgatcatatgtctcttctacaaaacatcccactaatacactatattgatgacattatactgattggaccaagtgagcaggagtaaccgctttgaactcattggtaacacatgtgcatatcagaggatgggaaagaaatccaaccacaattcaaggaccttctacctccgtgaaattctttggagtccagtggtgtagggcatgcagagacaatccttctaaagtgaaggataaggtattgcacttggctttctccaaccaccaagcaagaaacacaatgtttagtgggcctatttggattctggagacagcacattcctcacttactgtgttactctggcccatataccaagtgactaagaaagctgctagctttgtgtgtgtcctggaacaggacaaggctcttcaacaggtccaggattcagtgaaggatgctccaccacttggagcatcatcttggatctccaccatcatctgcagacaccattctccctttgagacacagctcttggtctactattgggccttagtggaaactaaacttttgacaatgggccaccaagttaccatgtgacctgagctgcccaacatgggctaggtgttaactgacccaccaagtcataaagtaggacatgcacaacagcaatctattagcaaatggaagtggtatatatgtgattgggcctgagcaggtcctgaaggcacaagcaagttacatggagaagtttccccaatgcctatggtttctactcctgttatatctgctgccagtcatgcacctatagcctcatggggtgtgccctgagggagagaggacctggtttactgatggttctgcacataatactgacactactcacaagtggtattccaacccctttctgggcaaccctgaaagacatctgtgaagggagatcttcacagtgggcagaacttagggcagtgtacatggtcatgcattttatttggaaagagaaatggccacatatacgattgctcactaatttatgaactgtagccaatgtattggctggatggtcagggatctggaaagaacatgattggaaaattggtgagaaagccatctggggaagaagtaagtggacagagctctgcaaatggcaagggtgtgaagatacttgtgtcccatgtaaatgctcaccaaaagatgacttcagcagaggaggagagttcagtaacttagtttataggttgatctgttcagtggacagtcagcctctttgcccagccatccctgtcactgcccgatggacacataaacaaagtggtcatggtggcagagatgaaggttatgcatgggctcaacaacatggacttctactcaccaagactgacctggctacaactggtgctgagtgccagatttgccaacaacagacaccaacagaatcccttttacaacaccattcctagggatgatcagacaactacctagtgacaggttgactatactggaccacttccttgtggaaaggaactcacttcatagctagagaagctagacagtgggcccatggtcacagaatccactggtcggtctcaccgtgtcccccaccatcctgaatcagttggtctggcaaagacaaaatggccccttgtagaaatagttacagcgccaattaggtggcagcagccgggagggctgaggcagggttctccagaagacagcatatgctttgaatcagtgtccaatatatggtagtttctttcatagccaggatccacaggtccaggaatcaaggggtgaatgtggtggtttgaaagaaaatggccccaaaagggagtggtactattaggaggtgtggccttgttggaggaagtgtgttaatgtggaggtgggctttgaggtctcatatatgctcaagctatgcccaatgagacagcccacttcctgttgcctttggatggagatgtaaaattctccttttctagcaccatgtttgcctgtatgctgccatgttccaccatgatgataatggactaaacctctgaactgaaaaccatcccattaatttcatttgtaagagttgctgtggtcatggtgtttcctcacagcaatggaaaccctaactaacacagtggaaaagggaatagtttcacccactgttgtcctattgacccactagaaaatttttcctcctgttcccatgaccttaaattctgctggtctagaagttttggatccagacatggttgggggtactccttcgaggagatacaacaaacattccattgagctgaaagttcaggcttttccatggccatttgggcttctgatgcccttaagccaacaggctaagaaaggaataaacagtgttacaggagtggtgattggaccagattaccaaggagaaatcagattgcttccccccaatacaggaaaggataatgtctggatgtgggaggttgtttagagcatctcttggtgttatcatgttctgtgattaaagcctaatccagagaggatgacaaagggcacagatgcttcagaaatgaaggtatggatcgtcttccaggaaaagagataaaatccactgaggagcttgctgaggatagaggaaatatagaatgggtagtcgaggaaggtagttataaataccagctagtgccatgtgaccagttgcagacacaaggattatcattgacataaatgcttctgtcatatttattaagaatgtgtttgcatagatatctgtgttctccttcctccgtctctttctcatgtaacatcaattacgagattatcagtgtttatcatatttaagttttgagatactagaagaatttccctcaagggacattgccacctatactaaatgcacaatgcgtttgcagttgtacaagggatagttatattatgttaggcataattatgtcctggttaaatatataatatgtttgtgactgtacatgggatagctagccattattatggctggttgttttcattgggaaattaaagcatgatataaagagatgtttgtgtgtcaagttgacaaaggatggacttgtgataggtgttcttggttgtcaacttgatgacctctagaatgaactaaaacccaagtggctgaggacacctgtgagggattttttttttcttaattcatttgaagtgtgaagactcacttttaacctggatctttgaggtgagaagataacatgtttaattcagatctttttttgtttttgttttttgggttttttgagacagggtttctctgtattgttttggaggctgtcctgggactctctctgtagaccaggctggcctcgaactcacagagatctgcctgcctctgcctcccaagggctgggattaaaggcatacaccaccaacgccctgcatttaatccagatcttttgagatatgaagacccacctttaatctgggccactccttctgctggcagcctacgtaaaggacatggaagagagaagcttgctctctaagcctgcttgctctagtccattccttcactggcattagagccaacctggcatatactgtagaccagctaagacatctgacctcatgaaccgaacaactattggattcttgaatcttctgtttgtagacagccattgttggactagctggatgatagcctggaagccattctaatgtatgtatgtatgtatgtatgtatgtatgtattcattctctaagttctgttcctctagagagtcctagctaatacaaacacataaaccaacttattcaatttgcatttcagctgaattaaactacaactggcaggcttatctcaatgggctaaaatatgcattttcttgcatttagcatacatataattccctacttgaggagcacttgggttgcagccaggtttttactgtttggaatgatgctgcaaacctagccttgtgtttcttttcctgtcacgggttattttgagtctggtcttattccaattgatgttttattccaagttactgaagatagacattgaaaaaaatgtgtgtagagtgctttgcctgcaagcatgtatgtgcaccacatatgtatggtgcccatagaagccagagaagggtgggcgtccgagctcctggaggaagagttacagatggttgtgggtgttatgttgagagatgggaattgaagctggaccctccctaagagcatcagtatgaacattgtaataagaatagagagggatttttgttaagactttttttcagtgtaaactcctgggttacaagtgcaggtgtcaagttagatagattgctatgttcatacgtaactgctgctgcttaacagcttcacgagtggcagcaagacatttgctgctgctctgtctgtctcctcatttgtagagtggagataacaccagcatctctcttaggactgttagggcagttgaaagaaatgatccctattaacctttagtgtatggatgttggcgtctgaaagcattccgtggaatgaagtattgtattctattagtctcattagagatattaaaattgtttctctcaggatgacttacttcattataaactttatagtaaatgattgttatttttctttcaacttggggctatttaaagtgttgcaggttgaatctcttgccattatctttctttggagactgttttcccccaatccaggttccttaatagttaatcacattttaaggtctaagtcataaaattttccatgtttcagggttagcaagatgtgttttcagctctaacaaatcattgcatatgcatctcaacctttgtcacctttgagaagtgtatcatttccttctgttttaatttcccatgtgttctggacagaatgttcctagccataacattataaagtaaaaaatttaggatcaaaataccatttccaattccccagcgtagctgtgtctattttgggattcaataatcagttctagttgcttttctctgtatttttgcctcacattgtttaaactattttagctgcactggctatgtatcccagttttcaaatgcctgagaccacatgttttctatttcagagtgtttgtactttcagctgtgtacactttaccatctgagcatcctgaacaccctgaatccccagttagacactttctgacatcactggatctagatttctggagtagggttgttcagactgcaaaaattgttatttatgtcagggcccgctcctcttgtgttttgctgtcatattccaaacacagccttctgagattctgagtgaagatgatgtcttcctgacaagttctttcctttttttttttttttttttttttttttttaagatagggtctcactgtgtagccctgatggagctcgctatgtagaccaggctggtctcaaattcagaattcagccttcctcttttgcctcctgagtgctgccaccagtccgtcttattttaaaagtattgtgttcatatgtggacaggtgttgttggccagaaggtgtcagatcccttagaactggagttacagttggtgtgagccactggatgagggtactttgtgtttggttgtttttttttgttattttgtagggctttttttgttttggtgttttgtttttaaactttgttttgttttagagagccaagtgtggtgactcacacttgcttcatttaagatttattggtgttgtgcttacatgttatatatgagtaccatgtgcgcgcctggtgcccttggagaccagaagggaaaatcagaacccttccaactggagttatggttttgagctgccaagtgagtgctagggactgaacctatacaatatcagcaagtgctttaaaccactgaaccctctctctaaccccttttgtttgtttccaagacagagtctcgtgtagccaaggctttgaactccagatcctcttgcctctacttcccaagggattacaggcatgctagtcagtacacctgacttggatttagtttggctggtaagcatgatggcaggcaggcagttagttctttggtacttttcttctacacaggcttccaactgtttcactgaagcttacccacccgggagagcaatgtattattatatacagcaatgtattattattatacagcaacaccctcacatgcacactcagaatgtttggccaaatatctgagcactctacagcccagtcaagaagacaccaaaaaatttgagcacagttgtattacagttttgatacacttgcctggtttcattccttgggttcagtttgcctaacactaatcccttttctttcttgtcttttcctccctccccctcatataaaggttttccaaggacacttccacaggcagaagccctggataaaacttaccagatagacacagtgataaacctcaacgtgccctttgaggtcattaaacaacgccttacagctcgctggattcatcctgccagtggccgggtatacaacattgagttcaatcctcccaaaactgtggtgagtagcaatagtggggctgacacacagcacaatgtccccgagttctcttccctagcaggcaaagctctgtaaacctggacatcctctgtctgaccaagacaactgctagggtattacttgatgagtctcgtccacccaagcttagtagtaaagctgagttcctctgtcacaggtgtgctcctcattcacaagtgctatgctgtaattgtgccatgtcccccataggaacagtgggtcgactgcttggtccccaactggtggtgccatttttgaggtggagcacaactggaagaagtcactggggcactgtctcggcagatcatgcatgatccttagccccttccccacgctctgcttcttatgtatactgtgaagaaaaccacacacacacacacacacacacacacacacacacacacacacacacacacacacaaagacctacacactccaaccatgatgtccagaagtccaagctcatgagcccaagcagccaagatagatgtgaaccttcagatactatgtgcccaaataaacagttggtcccttctacttgtttttctccggtgttagttacagcgatgagaaacctgacatggttttgattttcatcctgtgtgccagggtgtgagtgaaggcagaggcagggaggatttgcaacactggattacagttggaatgtcaaccacctcccagtagcccacacttgaggacttgggcctaacgacagagaggggcttccaagtccaaactgcacagtgctatggaaaggaccttgggggttctcactgctacagtgatctctttacctttagtttggaccctgtttactgaaatgttagcacattttttgtgattggtgctacagtaaaaaggctgtctgcttagaaaagtaccgtattactgagctgatgccctaatggctgtcttagggcattgatgacctgacaggagaacctctgattcagcgagaggacgacaaaccagagacggtgatcaagagactaaaggcgtatgaagcccagacagagccagttctacagtattaccagtgagttcttgcttttctcaactgctctcagacaatcagttttgattttccatactttacagctgaaatactaagctaccagaagccccattcccagctggcttaagcagtaacgagatttctaggctgtaacaaaaacaggcagggcttcagtctcctagctttcctcagttttgccattctcttagttttgcccacttctatgtactggctttgtttttccttcacagttgctggtatttgccagaaaggccactccttcctctttcccgaagggctgaggagtaaaccttttattcggagaacaaaagctctgggcatcagcatcacttagatgaaacactgcagccactggttaggaaacctcatactcattgttctaagcctgggttactgccagttccagtatcgatcatggggcttgggaggctggatacaggctagtccacatccaaggctttgagctcatttccacctacattaggccatgtagtggagggctggaaccagtgtgggggcaatagtaagcccaatagagcccaccaaaggtacccagagaggtttcctaagcatagaatttcaaatgatagctaaccctcagaattattatggggtcaacagtctttgaaggcttctactcacattttaatctgttcttcaaggaagtccgtatcatacacagaatatgagaactactctgagcgaatactcaactcaggccaagaagcaagtctgctttccgtcctccctccctccctccctccctcctccctccctccctccctccctctcctccctccctccctccccctcccttcctctgtccctcccttcctttcttcttccagggcatgagtactgcgctttgctttcactgtatcctgctaacgattcagggccaaagtggtacatgctgttgcagtaagagcatagacccagagtgagaagaccccactttcaaagcccagcttgctatttaattaacatgacctttgcctcttgcttaagccctgcctggtttcccttttgtaaaatgtgggtgagtttagaggcttgaaagtgagttactatatgtaactcatcgaattgtcctggatgcacaggaaatgctggacatatattagctgtaattatggtggctatttctgctacattaggataagcatgcaggaccatctgaacaggtcccctaactgtcctaacatttctaatagttcatttctggagggtgaaattacaagagttggagattcactttttacagtagctgtttttaagcttgtgttggtatactgagcctgaccctataaccctaggcaaggcatttctcctctgtaccactgattcctaccttacggtcagccagcattaaatggtccctgctctatagacctgttagcggcctggagtgagagaacccctgcaaaggcttagagcaatcctcagctactgaagcagccgcttttgggtactctgctggcactgtgccaggcccttgtctaagcagacaattagactcggttcttatgagcctccgaggaagtcaccttgtatgggtaagaggaaaactgtgcaaacaacatgcatcgtgcaatgggatgcaatacatgcttaccatcagaaaccattcacactgccttaagcaaacaggggtggggtggtgggagttgttaatcctataaccaagaagtccacatacagatggcagatggctggcccaggggcttaaggagtgccgtcaaaactcagccctttcagttccattcccggtgttggcttcggtcccaggtggctgcaatgttttctgactttagctcagctcctgccagctccactaactcagcagaaaagagacacccccccccccagctaaagttgtgggatgagctgcagccaaacactgttgaagagaaggtgtgggaaccctctcacttgaacctcatgtactgagtgtgctctacttgacggtccacaggactcagagcagagaacgccctgtgcctgggcagataataacactcccaagaggctgtgcctagagaaagtgcctgtaaggattagttctgacacaagatgggagggtggggaaagctacagaaattagtgactttctttctgggctcctgacgcctgatactttttgcccataaattcatgcttttccacctaagatctcatgcatagacttacaggtttaactaaaaatggaaagagtcttaaaaagaaatttcatgctgggcggtggtggcgtacacctgtaatcccaggacttgggagacagaggcaggtgaatctctgagttcgaggccagcctggtctacagagtgagttccaggacagccaaggctatacagagaaactctgtctcaagaaacaaaaacaaacaagaagaaaaaagaaaaaaaaaaaaaaaagaaacttcataatagccagtactgtaatttgaacaagcttaagtcttcttgtttttcctagccggggaaggttcatctgtctagaaatgtaatgctcttactccgtggaaggctaatttttgtagctggcttcatttcattagggaaattataatggcaaatgtatgtgtgtagggaatgggtgcctggggttctgcctcagtaatacatcactcctggcaccacagctgatgctagattgtctgcaagctttcttattcagagcttggtctcttgagagttccacctgcctgagaattgagaggataaagggcttctactatgcaaatattccctttgcataatttttctctgttgcagatgctttcacccagaaaacagctcctgttatttaagttaaccacagcaaatgtgagttgtcaacaaagggattcctttgtcctggcgacagcctggtgagaacagctgcagagctatgacagcctatttgtggaaattaataaatcaacttatatatctgttcttgggtgacctacaaaccagtgtgcacacccaagaaatgtgtgtgggttaggggagttcagaaccttaaggcaaatgccaggattctgagccccatacttcatccttaccccatcctgaacactagagtaaaataaaatactttgatggctggtctgtctggggataagccagggatacacagagaactctgacaggagaaatgattcaggaaggtagaatagaggggaaaggaacttggtaaaaaggaaggataatgagtgttaggaaactttcagacttcagtggacaaggcaaggcaggatgatgtcctggtgctgaccagctctgtttctaacctgcccacctggcgattgagtcccttcctataaggcaagagtgtctgtaagtaggagcatctgggcttttgacaagacatgaagcattagtataggcttagccagcagcacaggctcaataggacagctcagatctttttaaagagccccttatgtcagagaacaaaggttttgctgtccagccaagttccttcccctggatcagagacctaaactctcaggacttccgaagtcacatggactacaaattcctttgaaaaagctcagtaggcacactcagtcctgtgtaatctatttacctatctacctatttgtttttcatctttaggaaaaaaggagtgttggaaacattctctggaacggaaaccaacaagatctggccccatgtatattctttcctactgacgaaagttccagaaactacccagaaagcctctgttactccttgaggagggcagtatttagcaggatgaagcagggcctccttgcctcgccttgcctctgttttttgaagctcttttcctaagacgtctctgaaaattatgtcttattcataatggctttcttttggatgttactaaggatgcgccaatgagtcagacactaagtaaggctgatctgttaaaataacctggaatgtttaatctagatgtcttctgtggatttgcaattagaaaacattagagatgttgaaacttaaaaaaaaaaaatcatagcccaattaaaagagcaactagttaattgtctaccctcatgttcagttagcggttgatcacattttcatgattttctggaaaagttttttaaaaaaattacatcatttgaggcagataaatatctcattaaggcttttacataagccaatgccccatcacaacccccaaaaaatgttttctagcgccatgggatgtggtatgtgggaagtctatagatgacaggaagaaagcaactggctttatttacagatgctgccagatgcaagctcactgctgcctttacaggaaaagcaagggcacaggccaccatgctgtgtcctctatctactagtttccaatttgctatgaaaatgcacttatggacattttaatatggcttgttttcttttccaaacatgcatgtactgagggatatgatttatgttaactgagttctcagaggagcactggcaaatggcagtggatagtcctagatcctcgcacattgctcaggctgaggactatgcctcagcctagtgctggcatcactgtgtgctaccggttgccactgcttcaaagggaaacaactcttcttgtaccatctaagcaggctcctcatccaccgacagcactgtggatccaactcagccttgtgtgctgggcaagcatcctactgcagtaccacacctccagcctttagtcttttctttttcttgtgtggatttttgtttgtttgagacaagatctcattatgtagttctggctgtccagaactatgttaacaaggctggcttctaactcacagagatccacctgcttctgcctcccaaatgctgggattaaaggtgtggaccaccacagctggccccagccccagcctatgtagcccaggctagcttgaaatgatatagtccacgctggcctaattttcatgaccctcttgtttaaacctccaagtgcttaaattacaggtgtgtaccactaagccaggcctgggaaaccaatctaaacttcggtcactttagattccttagtggggcaaggacacatccttatatattgtggccccaagtgagaaaatacaagaagtgaagaaaaaacaactctaccttcaaggaaaatgtactctttatattacttggtgctaaatcaaagaatcaagcccttgcacaggctttgaaattttggcctgttttatttcagacacttaagtacaaatgccagcaggtggttcttaacatatctgggagtggggttggaatgtttgatttttaaaattcattgttgatctttcaagatggactaggcctttaaacaggattacaatgaacatcttgtcctttgtcaatgtttctatctgaatgctggtaactgatttctaacaatgttgtgaactatctaaactgatcagcaggttgttacttgtggcgatatcagcactgtggctgccttctgttttctgtctgtccgtggcctctggccctccaacccccttcatgtctgttgtggcttctcactggcttctttgtaataaattgtcttccaatagcacctttctaataaacaggtcttcaaataatgacttctttatctcatgtgtactgacttttatgacactgtttggtgatgtggcggtagagaggattggagaacatgaagtgacaaacttctttatcctgtgatcggaatgaccaagattttgtatatacatccatttgggaaccatgtatttctattaaaacagacagaggggacctgttttctggtggataggttgatatcagacattgataatggatatcattgttggggctggacagatggttcagcaggtaggtgcattggctgctctaccagaagagccaggtttgattcctagtgcccacatggcagcttataaccatatgttaacctagttctaggaaatccaatgtcctcttctgacctccatgggcatcatgcacacacatactgcacaaacatacacacaggcagacactgatacacataaacgttcttttaaaaaaggatcatcactgaatacatgatgctgaaaagcagatgttgtggggaccagtgcaagaacttttattttttggcacatgggatatgcatggagctgaatgccctgggcaggaacattgtaccttctcactgacaagatccctgtattaataactacagcttgcaactaaagattttcattctggaagttaggattaattttgttttaatcgattaaaatagtctaactgggctcaaaaagcactagtaaaggccagtaccataccagtttttgcatatgtagcgttccccccattttttctttttttaggtttcattatttttcaaaatttttaaggtttttatttttatttattatgtatacagtgagctgtctgcatgtttgcctgcaggccagaagagggcatcagattctactagagatggttgtgagccaccatgtggttgctgggaattgaactcaggacctctggaagagcagccaatgattttaccctctgagccatccctaggtttcatttttatttagtgtgtgtgtgtgtgtgtgtgcacatgtatgtgggtacctgcagaggctatcaggtctcctggaactggagttacaggagcttgtgagccacctgacatgggtgtttgaagtcaaactcgagccctctgcaaaagcagcaagtgctcttaaccaaggactcatctctttaggccccaccttttttttttaagcataaatttttatttaaattggaaaaaatcttattttacatatcaatcccagttctctctccctcccatctcccatgacccccactggccccccatccacttctcatggaggatgaggctttccatgggggatcaaagtctgtcccatcatttggtgcagggcctaggctgagagagtatccctcaccttttaaagacctctaaaaaacctgtttttccatagagaacacaagtagtgtcatctgttttcccccaaaggattacaagtgtctgaagagtagcatgagacaccaaatgaaagatataaggatcttaaaatagtttcctacctttagaaaaggtctagttctgtaaggcctatgaaaatattttcacctgttattgatggtaaacaatgcacaatcaacatttactggtctttgtaatttccccattaactgacactgtgagcaagccactaccagcttcttggacaacctatgaaacaggacaaacatatccatacagataggaactaaaagatgcaggatttaagggtcttcttgctaaaatatgaatgacatgctagaaaatgtaaatgggaaacccaaccccaaccaggacaagtaccacctatgtcccatatcaatttaagagctgcaatgtgactaactcagagtagtaaattgactttcatttttctctgaaaatcccctaggattaacttagcaatcaccttgcctacatcctacactgcagtgagagccactgagtaatggagatgcgtgtgctcttgggggaagcatcttaattcacttaaaaattaaaacaatttaaaaattaaaacatttgtgtgtgttatgtgtgttctcttgttcatgtatgaaggtctgatgaagcttaaggagttggttctcttcccaccacttaggtaccagacactggaatcaggttgtctggcttgacagcaaacacctttactgaaggtgccatctcaacagcccttattcactttaaacatggtatgaatgctcgtctgaccagtattttccccattaccataatgaaatgacatttaacagggtaaatggagttacagctatttggtcttccctctccttctaagacagtctctcaggtagccacaaggctggccttgaatctgcaatgcagctgaggaaaagcatgaaccaccctgtcttcacttcccagcactagggccacagtatgtgccaccatgcccagtttatgtggtgctgtggatacaattaagggcttcgagcatcctagggaagaactctaccaactgaactgtatcttaagtctccagctgtctcatttaaaaaagaaaatattttattaaacaacacatgaaatttaccaagtaaaacaacagtcttcattgaatattttgatgtcaaatatttttcactgatcaatttgaatctctcacagattagggaaaatttttatgacctgaaatatgagttatctatttgctatgtactactaaagaaaaaagaagaaatttattttggcaggagatagccagctctcaatactaaggacattttcaaaataaataaagggactctgatatattgttttgttttttgagacagggcctctctacctagccctggctgtccaggactcagagatccaccacccaatgcctcccaggtgctgggattacaggcatgggctaccacacctagcccaatatactgtcttaatactaatgtcctgccactgattaatttaatatccactagtggttccccaaacaaatcaattacacttttaacacactaaaacaaagaacacttccttcaggagaaaaaaaattacagtcaaatgtcaacagcatttttttttcttaatcagtttttgtctcagaaaataaaaccaaaataaactttaattatatacttattttgctaataccttttttttttttgtcaccagtttttggccattaagagtttaaattataatcctgcctacaatccacaaccccagagaagctagaaccctcttctagaaacagatttagaaatccacaactaactgttgggccaagctcctggagtacaatggaagtgagggaggagtgataatatgaacaaaggggtcaagaccatgatggggaaacccacagaatcagctgacccgagctagtgagagatcactgactcaggtctgacaaatggggaaacctgcgtaagaccgaactggactccctaaatataggtgtcagtggtgtgactgggactatgtatgaggccactggcagtgggtccaagatctaactctaatgcacaaactgacttagtggagtccattctatatggagagatagcttgctcagcctagacacaggggtgtgggagtggagaggtgctttggtcctgcctcaactaatgataggaaggacttagtagacttcctaggtcttacttctttgaggagcagatgggagaagtggggggggggaggggggaactgggattggaatgtaaaaaattaataaaaaatttttttaaagtttaaattatagaaggcagaaagtcgcaaccatttggctgagcagacaaggtgagggcagagtgaagtcagagtgggaaactgtcagtccagtaccacttctgtgagatcagggattcatcctgctctagtctgtccaataccacttctgtgagatcaggggttcattctgttctagtctgtccatttggtatgaagaggaaaactgagagtatgctccaaacaagaacaaagagaggaacaaatacaacaaaaacaaaacaatctcccatgactagtcactgattaaaaccattacaagccagtgagcactactatataaattagtcaaacattttattatagagtatatatatttatatcaaaaacacaaaaagacttttattctgggagccagggagattgtgacattacaggaatatgattcaatgattccagtccatttccacaagtattgggtgccccatcacctaactcagccccattggctggaagaaaacagatgaagcccatgtcacagctctagcccatgcaggccgctccgtgtgatttcttactcaaactgtgacctgcgtgcccaaccgcaggtactgactttataactgctacgaattgaagtgggtactgagccaaagattacactcaaaaataaccacagctaccgttcctgtaagtcggaagattaaccctcaaataataaagacatcataattggcactgtcatctaactctaaatacaaagaatcatcaaatatcctggtggatctcagtgacttaacaggaagtaaagctcagcagcatctcccgagctagaagccagtaacagatggagcgaaactgtcattaccactgaggtgatgattaccaaattcttagacatggctggcagtcaaggcagcttagctctacatcacttctcccggctttaccagaaggaaacacaataaccatcatgttcctcttactgtttgttcttacaggctgctctattcttttaaaacttactccctgagaggtcccagactatgtcaagtaaagagttcagagtaagcttgcagttcatcttgttggaaaaccagaaaattgtatcacttcctacacatgttacactccttaacattttaacagtcatcaggacaaagtcaactcctgaacagttttgagactacttgaggggtcaatgtcatgtttttaataccaactatatagtgaaggagttaactggtggtgccgaaaatacaaatgtaaatattaccttaaaacaataatttgtgccacccagtttacttattagtaaagtaggttaccactactgatttattgcttttaatgtgacgaacaccagatctgacagctgaactttgacagcagtgggacaagcacacttttatctttaattgtttccatcaagtcggacatgtacatatccacatttaaaagactctgtagcagatgtctcctcagtcttgtaaacattgcattgtgcagattttcatactttgattccaaaattaacaacagttaaaggcaaatttagtaactgaggggtggggagagtccagtttgacttcctgcaatgtatggtaccgctcctcccttcagaaacaaaacaaaacaacaaaaaaccctagcagcacataaaaaaaagttgcaaaacatttcagtactcttttccctcccatcaaaaaccaaacaaaaataaagtgcagcacccataaaagtgtcaagaaaatagccaagctcttcctttcttgtaacaaaatagtccttggcctcagcagtcttaactgaattacacagtgtccatcattttgtcgtcatcttctttatgtaccactgagtttaaactgcagagaggtgtattgatagaatactgaagataatctggattctgggggagacagaaagaaagagggaaacacttgagaagcagctcactctagcacagtcacctgcccatttggcttcatgcagtctactcttctgcagcatagcaaataggaaagaaaatgcatttttggagtctacttgggctgaaactcaaagaactaatggtaggatgatgttacttaatccaaagagatgtggatatatgtgaacagaaatataataggtaccacacctttttaacactttcaacaaaactaattttaattctttaactatacaaggttaaatttccccataagtagtatattttaataaatatggcttttagggggctagagagatgactcaacagagagcacttgttgctcttccaaagtaccagggtttggttcccagcactcacatggcagctcacaaccacctgaactctagttccagggaatctgccagccacgcctggcctctgtgagtactacatgcacatggtacacagacacgtctgtaggcaaaacacccacccacataaaataatacaatcttaacatctgttaagatacagtttttagtcaacaatgtatccttaaaattactaattaagacagtgacgtactataaatgtaaaacattttgataaaggcaaaattcatgtactgagtaaaataaacttgaagaaaaaaatctttactgaagaggtacttttgcctacatttaaaaaaaaaaacataagatttcaaaatattgttcaactaacacaagactgatttttaaatgttccatgggtaacagtgtaagctcttaaaactcaagattttacttggccatttccttcttttgaagtgattttttttttcctactcagttattctgagtattttccagtgatttggactttttataacttttattacctaacttcatttgtttttaataaacattaatgagtaacgttatccaaatgaaataggtttctttagtaaaagccaaaagctaggtaggaatttgattatttccaagagagtctttttttattttgttttaatgtttctatttagtattattaatattcaagaaaaaaaaacctgtcacaacttaataccactaaaagtcagtccagagaataaacatgaagcagccactacttttatccaagaagccactgctgagtcctatcatggctaacaatggaaatatatggtgtgtttcagaggactgtttttcactataaaaaactcaaatcaaatgttaccgaattagacactttgtaaaagtcaacactcttcttatattaccatccacttcagatcccagagcccttcaagaccaaacttacagtaactctaacgtgatactcagaattaaaagcaatcaatatccctaacctaagcaatactgaaactccactggtttccccatctgtctgtctgtctgtcagcattctcagcatttcacttatctcagtacacagttctccccaagggcatgactacttgtagtgtaggacttcgaaggctagggaaggacattcaaaattagagtgtcatttactgtgttggcttaggcaaagtaatttaacctctgtaattttcaacttacttatgtgcaaaaatgaatttaaataaaccacagcattttaaagaagtttaaatgatacgtgtcaacatattatacaacccatgaagtgatatgccattattatagtaagactgttttcagacttcccttgggtggcctcctcctaccgtttcttccagctagtcaataatcttaggcactaacaggaatcttgagcagcactgctctccctgaggctgttgtctagggcaggatgcctaaattctcaccctgtaaggagtctactaacccagagtaattaagtatgaagactcctgatagtagtaataattcaaataacaaaattatgactccagccttctctgctacaagtgacaatggaggcctagcaaccagtgtcagctgctaactttatgtatggaaaggcttactgctctcaaaccgaaagcatcttcaggataatacaggccgcttatattttgttacgtgtaaagaaacagatatcgtttaagtatctttttcctctgtatgcattaggcgaccaatttcaggtttatctactgcctttgacatcataaagcttccttggaaaaaactgctttctcgtgtgctacttctcaacactgtatttaagtaatattaaagaagtgatctggggtctagggagacggctcagcagttagagtacttgctcccttgcagaggaccagggctcacttcctggtacccacatggtggttcataaccatgtataaccaacagttccaggggatccaaaagccctcttttctggcctccctgtgtaggcacccggcacacattggatacatgcaggcaaaatattttcatacaaataaaataataaaacaaataaaataaaacaaatatttaaaaaattgaaaataaagaagtgatctgaaaggacatatgatattaggattttagttgggaggggtggtaggggaggaagggagggagaagggaactgggattgtcatataattcaatcttgtcatgtaattcaattcaatatatattcaaatatataaaaaataagaaaaaaaatttaaaaagtgatctgtaggcattctttagggcactattcctaacatgcctaattaaaggagaacactagtaattatttaaagtcagaatgtgaatgtatatatccttgaaaatgtttttgagttaaatatgaccagttgctttccttactattttggatattacatgaggttaaaagtgctaatgtaaaatttaacagctattttaaaaacacgttactaaaatggtaaaattatagtgacataaggtcaagaaattgaaaatctcaatttttaccattttatgaggcttaaagataaatacaggactctcctcatattgtcttctgaatgacactttccatctcccaatgtagacaacagaataaactggctaaagctggtcttaaaatcttggagcctggaaatgagagataactgggctctattaagctgctacttctaaagtcacaacgggcagggactgtctgacaatatcttaaagctctaagaagtaagcagtcagctacactagcggtttgctcccctctcttcactgacactctttcctgttaaagcataatttttaccttgatctaacagcagactctaaggaggttcaaacagttgctaacagtactggatagataacatacaaaaagtgctacttaacaagtgctacttaacaaggtattaattacataaagccacgcagcagatcactttagctaccactcacgtcgctctcaagctaatttcatcctttagaaaactgccaacagtgtatttcactcagaaggagatgtttgtgggaagccaccctgagtttatgactgagataaccattaggtagtgatgcctgatatttaaaatgtttaggtacagctcatcttttccacattaaaatgagacagaatgtggtgtctctaaaagatagaagaaactcaatgccaaagcatggaatgaaataagattaagggggtctcttctgcagccattcgctgtggcgaatgaatgaagggcccaagctaatggggttagcttgttaaacaactgcaataaaagacactttgcttttgaatcgagaaaaaaaaaagaaaaaaagaaaagaaataagaaataataaggattattattatttattaatttactaatttattttggaggcagggtgtctcaacatacccatggctggcctggagctcactatggtgatcaggcctcaaactcacagagatccatctgcctttgcttcctgagtgcttggattaaaggtgtgtgccaccatatctgcactaagggttattttttgaggcaagaaaaatgtaagtggtcacacatacaatattcacgagtggtcctacaacaaaattatgtgaatgaatttatgaaataagcatccctttttccagcttacctgtgataagggttctaaggagcctatgcatccaactccagaatggggaacatgattctgaaccgtcacaggttgaaagctttgtgattgagcgtaaagtcttactcttgacttgaaagcttcaagttcatttttgaatgcttcaaaataaccttcttcctctgcctagaacacaaaaacaaacaaacaaaacaatgtttctggactactaaatacagagtcgatttcaaaagcgcatagcagacctgagtagaggcagtgaagaacagtcaaatgcagaaaccagcacagtcccctggcacatttgtgaacagtttctttcacaggaacatttacaaatagttggtctgctctgattttttcgggctcaacaaaattaactcgcaagaaacaacactcctatttatacacacagagtgggagtggcctgggtacagctttttaagaccagctactcaggaggcttaggcaggaagatagcaagttcaaggctgggtaggcaaaagagtaaatttatcagaacagggcaacttagtgagaccctcaggcagatctctgtgagttccaggacagtcagagcactatctgaagcctaatctcaaaaaacaaaaacaaaaaaactccaagttattattattattattttttaactttgagacaggttggggtgtggtgatatcttgcttgtacaaacaaagcctgtctgagggtcagaaaatggagcttgccactagctaaccatagggttctggaggtacagacaggaagtgagataggtggggcagaaacaggatataagcagggagaaacagaacttgctgtcttattagctgagaggtatggtgtggtggtggcttgctgtttctctctgatctctcagcattttcttctgtatctgactctgggtttttattatttagtccgattaagaacactagggtacttgctcagtatgcacaaggccctagactcaattccaagaatcacaaacaaactttattaaccctcacactcactttattctcacttaattggggagggggcactattactatccagtatatctctgaccttttaagactttatttctgacagttacaaaagacaagctcaacattcaacttaattattataaggatgtcttaagtgttctagctcagcaattgtctggctgattgggaaacaaacaagcatggtaacttaggcagggcagagactcactttctagcatccaatgatgtaggagttctccacgaaagcccctctctactgacagaagcctcttttcaaacatttcttctatgtgtatctggcagggtacatgccctgtgctaacagtaggcttgctttaagttcagggggtagaaagatcttgacaatagagtttaggttgtagaatttggttgagattgtacattagttctgggaggatatctgtctttttttgaataatttccttagttagacttaactcttactgtagtcataactagctagtgcttgtgtggacctatgctcctgtccagtgcttacatccaaaggcaatcgctatcataagcaaatatcgtgattgctgactttcctgtagtcctaaggcagagaggcttaaatctctgaagagacctgactctgtttaatgaagtaagctacaagacactttattttctttataccagtttcctcccttacgaaacaagagtaaaaatcttcaaaaatccagaaggatttaataagttaacctatgcaaaatgattaaaacagagccagcctatcatgacagaagtaccccatggatattactacctaatttttaatattaaaactgttaaggctgaagattttaaggattttcagttctgttttatcaaagaaaaaatttatatgtagtgtggcaatgtcccattaccaaattaagtatcagtttaaaaaaattaaggtatcaccaaaaggtatagtttttattgattttatgagtcaagtaaaaatttagttaccataagcctagccaaaattcccacccagtcatttgttcattcaaagtctactgtaaactataggacaagattgtaggaaacggcatgaacagactgcacttcagacagtaggactactgtcaccttgctacatttctttttttacatataaaaacagaattattttgttgtctgtttctaacaagaattgttcactaaagtaggtcataaagaaaatgaaactaaaaactctactactcataatcaaagttaaacttctggtacatttccttttaacttctaattacatatgataaaaagtgcaaaaagccatatatacgtgtgtgtatgtgtgtgtgtgtgtgtgtgtgcgcgcgcgcgcgcgcgcgcgcgcgcgcgcgcgcacgagcgctcgcacatgcccacaaaatatacacatgcagttttactgggcaaaaattccactccatacccacagaaattaggaaccagatcatcaccagtacctcagaaagcagttcccaaaggttcttctcttctccctgggtctcaagtcattcattttgctttacttttcctgctcatacatgtagctctcaaaaatatactgtttagttattatgcctctaaaaacgctttataaaacataaaatacttaaaactaccaactttataaaatacatctttaaaattgatagtggctacacaactagcttgtttcattcattcctattgtttgcttttttccatctatactgatgataaaaatctatcaatgaatacacccaatttattcttagggttactagcaaaggcggccagtcttttggtattataaacaaatctatgagcagcacagcaccatgtgcagagatgtaagagctgctttgggacagagattctcaagcctcacggcccttctacatgaaaaactcacttaatgcagtcaatatttactgtgttcaaaaacttaaaaagacccaggaataaacttattacatgctgccactagcagtgtacttttattttacacaattgtgttttcacagaactaaacatatggtgataatgatgtatgtctacttgagactcagaaaaggtgaccagtgaagcccaggaatgtgacaagtctgggcagcggtgacaccttctctaaagcattaggacccaagttggatcctcagctcccatataaattcttggcatgatggcacacatttggaaccccagcactgaagtgggggaaggggatctgacaaagacaagctgatcctgggggtttgctggcttagccaaaatggcaagcttcaagttcactgagagaccctgccttggaaaattggatggagcatgatagaggaaaataccggttgtcaacttccagccgccacaaagtgtgtaagtaaacctgcatacacacaatatgtaatatttaaaagacaaaaatgattccttaaagcgcccttccccaaaggtgacaattgtgaaatttgattttcattctctcaaatctctcatgctggctttaacagaagatgacaagttctaccatctgcttcagcatcaactgcacactcaggagtggatgagagtgaaagcaggctaatatcacactagtcttatgaaaaccatggttactgaggtctcccaactaccaggccctgagcacactctaagaacctgctctctatggagcattcctcaaaagggttttgctgttcagacatgcacttgctcagttcccccagaaatccttcccttttaaagggggtgttctaactcctacttctaccagcagtgaattcaattcttactactttgcttcttagaaaacttttaattattactgatccagtaaacatcaaacagtaatctttctacacatatctattttccgtagtagggccaaccttaggtttctataaaccatgtatctcttgctttaaacttgcaatataaacattttcttaattattaacaatgttccaaaagtatgcaatagctgtgtaacattccatgtccactgtgccttctgcaagtcaggttgctggcttgcttccttcttccccccctctcctcctcctctattgtctctcaacaggatctcactattgcaggctgtgctgatctgcaactcataatcctcttgccttgcctcccgagtatagcttgtaattttttcattacaaatttggtttcttaaatgctgagttctacatggcatttgaaatggctttgctatccgttagtaaatactctctctatagtaaatgggtaaatgatgaagtagctcataatagtcacattaatttgcatgggtttcaaaaatggggtttttaaatatgtggcctagtgcagcctctttctcattttaattctcaatcagcacaaaaactgggatactacactgtattataaaagttaacatactatgtaaccactatactagcttatatatacttataatactatatacctttcttttccctaggaaacctacagcatccagcatcctactgcctagacagctctttctgatacatacagaacaaagagagctcagctacagtccacccttactcaacaacaccaagttactacttactttggctttctggaaaaacaaacgaaaacagcctcttggatccacattagagtttttggccatttccataataaactgcattaccacagcttgatgtgctatttgttccattagagcacctttctgaaagagacacataccagagttacacaaaatacttctggaaagagactgaattggcactgaggcaaattttgaattttcagagtacttttgattttattctccttattgttaaataaaatattatatagacataaagactgcttggcttggttcacatcatgattactttatgaaaaattttaaacatgactaattagcagaaaaggaaaagagtaattacagtgcatgagagtgatcagaaggcagcaaagcgaatacactgggaaacaacaaaatccttgcagcaaacttgaaaataaacaataaaacttcctaattccttcttaaccttcctgcttccccctcccacctctctgtagcgctggctgtcttagaactagctttttagaccaggcggtccttgaattcagagctctgcctgcctctgcctctgcctctgcctctgcctctgcctctggagggctgggattaaaggcgtgagcttccaccgcccaaccccctgcttcatttaaagtaagtaacattttttttttttaaagtaaaaactaagaattctattaacgtttccagacaccaaagattcatacgatacctgctcagcttctaggtgaaaacaccataaaataagatatttagcagtttcttcgcatacaaggtatgggtggtcagacagaaacctctgactatcatcccaccgactcaacatacctgtaaaagagaattgaatcacagacgtcaaatatttcctttctttctgtgaagcaagaaatggattttaaatgtttcttttaaagtcagttcccagtaccagagcactatggtaatgtgatagggcacgccatgagcggtaataactctgaaagcaacatccagcaggctggaatgacagcaagctttatttcacatagtctaagaagagtgaccagttgaagttccctgcttataggaagaccagcagaagtcctctgcttataggaatgcctgaagtcccacatactgtgcacaacttggtcttcccttaaggttaaagcgagagcaaatgtttttgaggtactcctatcatttactaagagaacaaaatgctttttattagaaagacagttaagaatctgttactgagtggcttcggcaaaagactgcaaatggccacagaacctgtttaaggacagcctgagcaactgtgcaagactagggcatggttcaatgataaaagtgtttgcctattattatgcatgaggcctaaggcttaatctctagtaaaacatttttaaaaagcaagacttcaaaactatacttggcaaatttaagggcttactaaaaattcttattacctctaatttattttttaaagagtttaaaatacagtaaaatataggataaaattcaggaaactttacctcctgggaaagaagtaagtcagcgttacaataactaatacactgcaattatttagtcacattaggcaattactaatgctgtctttttagttatacaataaactttttaaaaaaattagttgaacatgtatgaaaggctgctgttttgtttcaagatattaaatgaatccaagtagcagttagcatgcatctgcatctttatctaacttaacaaagttactgtagccaaacaacccagaacctgggaatgtgctgttcagggttacacttgaatgatcactatgtcagaaacttttagattattcacagcagcaaaaacagtgtagatattaagtcatcacttaagtgtcatttatgtcttgagagtcataaataaattcctacatacttaatttcacatgagaacataagatagaaataaaaaacaagtatgtgtggggaaccaactggaaatatactatctttagaaaaatgctgggggcaatttcagcattttttaaattaagaaaaaaaggggggccagggtattctacttaactcaagaacccctcattctttaaacttctcccgacccttccttccagtgtcaggattacaagggtacaccacacttttctgacagctgggtcatttaagattctgagacacagaatgattctgaaaacctgagctgatgaaaggacaatccttatttctgttttttttttcctaatttgaatttttaaaattcattttacataccaaccatagttcattccccctcccacccctcctcccacttcccccatcctaatttcttatacctaaggacagatgacaactatggctcagtttctgcccctttcctttcccccatactctcttttgagaggaactcatggaacccagggtgactttgaacctgccacgatcttctttctccagtgctaggaatacaggatcttgcgccaccatgccagatttctgtactttgaaagataaagcctagggctccatcatactagttatgcaccctcccaaataagctacattcccagtccctttgctaacctgcttgtacttctaaagagattttgtctacagtcaatcatctacaattacctcaacatggcagcattatgactttataaacaaaaccctgtccatttggattctgaactaaagacaatatgaaaaggattggtaacacttgttaccaatctgttacaagctggtttttatctttttaatacctaagacacttgagactggacaaagatttcctgtatctaagtaaattagatcttgaattagtaggaaattgagaagttacaagtagtccatataggagaaaaggtgtggaattttataagaaagtctttaaagaaagcctaaagttacaggaaaggagcatatttgaaatccctgtcattttgagagttgtaaacagtacatgagctagggtgacagccaaggagacagactctagagctaaagagccttgctgtgaactgcttcaccttgggcaagttccttcatataagcctgcatcttcccacgtagagggggctaaaacagtacctgacatgaagggttttatgaattaaaggtattagttcatataaagcacttagaacagggcctcacataggaaatacttgatagcaagtattaatacaatagttactaattcactcatataccaaatacttacttagaccatctttgattaaggataagccacccaagtaagaattcttagaatagcttactttgacaaattaaaataagttaactttcaaaccatgtgtcttcctgacaaacatctgtcatcggttctcaatagtctatatgattgttaaaactgcttccagtacacaacaaagcctgcattatatttacagaatacatttagcatttcataccatctatcgtaactacctgccaaaactccccaagctaggctgcaagacccttgagaaaacagtgattactttaagtttctgagccctccctgcatttcccgtcatctatcaccacacaaccgttttttgtttgtttgtttgttttccacctccatacctatgctcagtcatgttagctaaaaaccaaatccatccttttccctgccaccccacaatgcttctgaggtttcaggttacccccgtcaggtattcaagaaactcctcttgactttccatttctctggcatcaaactgaccatgaagttcggtggttatactattatatactagatacatcttttaaaatataaagccatgccaaaattttagaataagaccttaaaatattttttcaggtaataaaaattaaatatatttgttgtgaagaatttggaaagtccccaaagtaaaaaaaatacacaattctattacagagacaatttaaatcctacaatacatatgatttcagttcattttactttatattttactcaagtactttattttttttcaaaaacaggttattaatatttttaaaagtaaaacacaagtgaatacaatgaagatattataaatgaaagcttttatacagatgtttatagcttttgataaaatttccaatgaccacatactacctagattcagaaaatgctgaatcaaagctaactatggctggaaggcaaatgatgtgctccgaaaaaccaccgcacaattcgaaaagcagctctgaggaccacaaagacagtgatgttaaaggtgcaaataactggaaactgttgtgaattataagagtaaatgagctctctgtctaaatcagcattttgtatttctaaggcatgaatcaaccaataaacaaaaatagaaaggaaaatcagatttcaataatctgtaacactatatataataatggtactatttactggtaatgggtaaatttcattcaagtataagggtaaaagcaacaggaaaagagtcatcaaacagtataagggagaattaggaagaactattaagtacctaagtgcaggtaagacaaatattggtgtgaagtccctgctgtcctacacagacaacaaacgcacattcacaggccctctttttcaacaatctacaatggaatccaactttggaaagtctccacttagaagctttacttacagttgccattccagatgtttttaaggagttcatcactgtacctaccagtctggcgatgctttttttcgttactaataagcatacacctgcagaagtatgtgctttctccaaaggtggataaataccatcaaacccccaaaactcttgcctcaggcctctatcagctgtgctacgactttgtaaatgtgaattctgctatctcatcaactcctggaactgtaagtttagtccacgttacgttgctggaacttggcaagcagaactagcagaaaccaccgatgcctattatatataagatacacatatgtcagagagtggaagttaaacacatgaaaaatttgggagcctactaccttaggaacatttttgtggatccaatgtgctgcagcaagtagggtatctcctccaaagtgaaaagccaatgtgcatttccactaagaaacaggtacaatgtgagtctgggactggctataagtctggttggatttgaagacagcaagggtctggttagtattacaagatgaaatgctggaaactcacaacatgcaatggtagaacaactgcacaataatcatctctggatgccaagccagtcttttttcctggccatctgactaaacacacaataggcttaggtgggcacaggcttgactttatgcagattcaagagcatggattcttctcactaaggacattttagtaacctagtccagtagaatcaatggataccaaatttttcaggagcaaaaaaactcatgctaaaaccccaatatggaaccatactctttagaattaatcatctaggcataaagcagcagcttgagtattattggtccaatttcttcttggagggaatcaataatccctcacatgaacattctctttacctttctatcagaattacattttggggtttacgagatgaactggttactgtaccacgttatttgtggctcatttcatatcaaaataaacgatgaacaagaactcatgaaattcactggtcttaccatggactactcagaaacagccagatttacatagtgaggaaagggtctactgaagactgagtctcagtgtcaggtggattacaacatcttgtgcagctgggatgttttcccacacagaactgcatttaaccaaagcactcaaatctacaatgaaagaaggtactatttctcacttactaggtgacacggcttcaaagcaaacagtctacagaatgccagctgggcaaaaacaccagtgacaccactctatcaaatgccaggtgagcccagaaagaagcaccagtagatagcacatcatttccctgcagaacacatgggccttggtagcaaggactgtagagaggacaaccaacaacacaggactcatttgcaaatgactgtcttctatccctgtgattcaagaccctgctggtttaaaaattttaatatctatccaagagaggattacttatcccttttgtttcaattatatgaattgacacactgatacatatagaaacgtgaatttgtatgtttagctttcaaatactagcctttccttgctttctggctatttgtgacaatctcacagtccaggctagccctgaacttgagatcccctagcttcagcctcttcagtgctgtgattacaagaatgtgttatcatgcccagctttcttcaggtactaactattcttgaattaatgtaccggttttccttttgaagcataaataatactctctctgcaggggcacaaatggaaaaaggtttcaacatgccaatgatgaacaaaacacaaacaataaccatgtcttttaattcacacaatacttgaataaaaaaaatagtctgaaactcaactccacacacttccgagcagcattttctctcttttttaaaagatttatgtatttatacgtatacagtgttctgcccgcatgtaaactgcaggccagaagagggtggctggatgatctcattactgatggttgtgagccaccatgtggtaggaattgaactcaggacctctggaagaacagccagggctcttaatggctgagccacctctccagctccccaagcagcattgatttcaaagtaacagtatcacactgcttgtatgtctcagaacacaccaataatatattattctgactctgcatttttttttttgttttttgttttgttttttgagacagggtttctctgaagctttggagcctgtcctggaactagctctgtagaccagggtggccttgaactcacagagatcctcctgtctctgcctcctggtggtgcgaacaccacccagatctgactctgcaattctaatgctgttgcctaatctccaccaaaaatccttatctgcccctcctaaacaaactcaaacattaccttccccaggaacccttcatttacttcagcttcaccccctacccttcttcccccaatagaaaaagccagttctgggactagagaaatggttcagccattaggaatgcttcccgcttttccagaatctgagtttagatcctagcacccatgctgggtggctcacaaccacccattactcaagctccaggggatctgatgccttcttgtgttctccatgggcaccctacacatgtggcatatacttacatagacacaaacacatacacacatatatttaaaaataaatggcaaaacctgtaccttagatctgtgtgtgtgtgtgtgtgtgtgtgtgtgtgtgtgtgtgtgtgtgtgtgtatttctgttctattatctgagcaacatgtcaaggaactatgaattacacaacatcctatccaaacctgaaaaaagaaaacaaaaaagtgttggcgctggatgacacagtggtaaggttacttgccaccaaacctgatgactcaagttcaacccctagaactcacatagtggaaaggagagaactgactccattaagttgtactctgacctctacacatgtgccgtggcatgcacctgacccctccccctctgcccatgaagaaaatatatataaaatgtttaaatggccactaatcttttaatgttaagagaaaatagagaaaagagaaaaacaaaacaaaacaaagcataggatcagtcaagaaatgcgaagtggtgatgccataagagagagcagcattataacctggtttaagacacaagcaaggtctgcagcagatctgatgaccccacacagcaggagtggagctggccacatgcttcttggatctcattttagaggttccgttttatacacatactgatggtatcaaacacaataaagaaggaaacttaaggagtagactcaccaaaatgtcggattttttgctcatatttctgcataaatgattgtgatttatcttcatcttctgtttttcttttatcttgattaataaaactctggaaaaatttagtaactaaaatcagaatctctccagatgctgaatgcttagcaatctttcctatagacgtgatgtaataaaaacatggcacagtactaatctgttaaacttgtcattaaaaatattaaacattctcacttggtagttccattggttttgttttaaattataaatttatctagccatcacacaggaaaaacagttgaatgaatctttttgttacccaggttatcctatcaaaaacaggaatggaaaaattcttttacatgtgttattcatttccaatacatacttgcaactctagcctaatctttgagcttcttgctagaagcaaactcagcatccaaagcacacagagtcaaagatatttactataaatatttgagaagagataaaacaaaaaataaaccttgatattgcattcctaaaaactgtctcttgggaagctaaatagtttaattcttaaaactacacaaacttctactgaggaagtacttacatttattaagtaaatcatgaaacagaccaacaagtttctcatctaatcagcaaaactagcacaacagtttcccacagtattctatgatatactttataccgatattatcactaccaaattaaaaagcacaaactagctccctgccagcttatatttcaaaataaaagcaccttgtactttttttgttatctagaccaatattgtcctagttacaaatacaccttagaattttctatactagccccatcaaaaaagaaataaatgatgttcataacctaatatattcaacatattatcatttcaatgtagaaaaaaaaacaccaaaaaattattaaccaatacttcactcctggtgttttggtactgagtaatggaattcagtgtatattttacacttacagcacatcttaacttggattaaccacttttcaattgctcaatatctcatgtggtattgattagcattgcctttaactccagctccagggaatccaacatcctgttctggctccaccagaacctgtgcacttgtgacttacaatcaaacaaacacatatacacgcacacatacacacacataaattgcaaaaagttaaactttgacaggaagtgacaacatcttcaggcctcattgctctaaattaaattctcttcagaggtacagtactgtttcagactcagaaaacactaatggaatataccaaatctacctttgtcataaaaataaagcctttaggttctgtgatctgttttccttagtcaatctgatagagagaatcaaaacatttataccgatctgtatattcacagacttacatttctccaaagtaatgttggctactatcttcaatatttactcaaaatttattgtcttaaaaacatctgttatcttgtttcaccttcctcccccttttcatgcactttgaaacccatctttataaactctagtttccaaacagaaaacaaatatgtaacccagagtagtttgagaaaaatgagattttactagttcagctaggccaacgattagcgatgtcctttgttagcagtaacaatgaacatcattataaggaaatcattttatttcctttttattttgaggggtgtatgtatttctaggaattgagcctggggtcttgagcatgctaggcaggtgctctaccctaagctacagcctcagtcctctttttacttttttattgagataaggtctcactaaattgcttaggctaccttgaacttgtagactgtctgcctcagccaccttggattacaagcctgtatcatcaagccaagtaggaatattttcatttttttttcagattttttttatttgaattagaaacaagattgtttcacatgtcaaccccagttccctctccctccctgagtattttcattcttaaagacatcttttttatttttccatttaaaaatttacatgtatgaatttttggccttacacatatgcacacctgtgtatgcttgtgtccacagggtctagaagagggcattggatccacttgaactagagttaacgacagttatgagctaccatatggtttctggaagagcagacagtgctcttaacttctgagccatctctctagcccctcattcctaaagacatcctaataatttttacctcatctttcaatcccacagtttagcatttcttcttgacttaatccagtacctgatcgggtacttaatttttagcttcttcattaataaaataaggtggctcaattaaaaatctctgaaacagtgaccacattagaagcactaaatgtgggctgtgaacaaagtattcttaacttggatttagctgctcttatccttaaattctctatccttaaaaacactgaacactttctacatgtttgctcagcttcacatgtatataaacagtattttagactggtaagtgaaaattgcctacagaggttaggggtattggcttagcagtacagtgccttgggttcaacttccagcaacacaaaaacaaaacccctcaaacaaacaaacaaaaaaatgtaggcaatctgtaagctgtaagagctttcaacccttcaaatacaatttagatcaagaaataacactgtatatgtcctagcatgaatacatattcccccaaaagaattttatgacacagtggtgacctttattaagtaggatgaactatggtttttcccccccatttgaagaagataaaaatgctggttggacagcaccaaaatgttttcacaacctgcttaaactggctcttccacattcctctaacaacaagtctctcatctacaatttaaacccgtttcttcttcagattcaaaaggaaaagctacagcttccatacactagtgagaaacagaataatgtcctgaaaaaaactaacttagagatggaaaggtggataggcaggtcaagggactgaattcacattatggaaagagaggaccaactccagtaacttatcctctgaccttcatacatatgtcctggtaagcttgctcttgtgtatacaactgctctctctccccattctccctacacacacacacacacacacacacacacacacacacacacacacacactgaagcaaaaacctactaacgttgccagttagtggccccaccaccacaagctaaggaagagggattgtttgttttgttgtgttgttttttattttgctttattttgggggcagggtctctctatgtagacaaaactgttccggaagctgtgtgaaccagactggcatcaatttactgagatctgactaactgtggctggggtttgaaggcatgtgattcaataccctgatccagtcttaacactgggtgtggtgccatatatcacaccccccctccaagggaagcagaggcaagcagatctctgattttgaggcctgcctagggtatagaccaagttccagactgatcagggctacacaattggaccctttctaaaaaacaaagtaagacaaaacaaaactgattctgtctacaacaacaacaacaaaaccctattaatttggcaaaagtattatactatttaagagactgaactatctagattattaattttaaagggctgtttcaatattaatacttgtaaaagaagtcaagactggtacctaaaacaagacaagggtgcctaattccttcattcttagtcaatatgctacttgatgtcttacaaaagtaagactaaagaataggaaaggaagaagtaaatgtgatcttacttgcaaatatatagctctatttgttagggaccctaaggactataccagaaatatctttaatttgatacactttcagcaaaatggtaggataaaaaactaacataaaaatcagtagcttatagactaatatgctgagaaatcagaaaataaaaaagtcccattcacaattgctttaaatacagacaaaaacaaaagatgttggaataaacctaatgttaccaaggaagtaaaaagaaatcgtctatggtaaaaaccctaaaacactgaggaaagaattcaaagacaatggaaagctcttctaggttgatgaattagaagatttaatattgtgaaaatggctatcataccaaaagcaattactgattcaatgcaatctccatcaaaatctcagtgtgttttttcacagaaaaacagaaaaaaaatccaaaaaattcaaagggaagcacaaaagaccacaggacagcccaaacaacactgagctaaaagaataatgctagaggtaccattatacttgatttcaactgtactggagccacggtaaaaacaaaaaacagcatactatcacaccgccacagctgacaaagatgtcaaaaataaaccgacagcctcttcaagttgtggtggcaaaacagggtatacacacatggaagaatctagatctctcatccaaatggatggaagaccttaatgtgagaccagaaagtttggcattactaaaggaaaaggtacagaaaacatttcaagataacagcatagtcaatagtctgaataggactgtcactcaagaaataacaccagcaattaaccagacattttatacaaagtttccatgtagaaaaacaaagagatagtctacaagatgagataaaaatgtgttagctatacctcagcagaggtttactacctgttttaagattaaaatgccttattacatttacttgtttattttgcatgagcatgtgtgtgtgtgcatgttcgtgcacatgcctgggagaacataccacagaacgtgtgtggtggtcagaagacaatcttcaagggtttctcccttcaccatatgggtctgtcctaaggatcaaacttgggtcattagactcggtggcaagcacatttacctgctgaaccatctcactggccctaatatcttttactaaagcacacaaagaaccaaaatactggctaacaagaaatcaaacatcccaatcaacaaataggctactgaaatgagcagacaattctcaaaagataaaaaacaaatggctaaaaacaaaccaacaaacaaaaaaaattcgacactaccagtcatccaagaaatgcaaatcaaaactatattgagattccatctcatcccaaccagcatagcggtcattacaaaaacaagtaacagcaaatgctggcaaggttgcagacaaaagggaacactcacacactaataggaatgtatgagagcccagctactatggaaattagaatgttgatttctcaagaaactaaaaatagatctaccatatggcctggctattttactcctggatagttacctaaaagactgtcagtcaacgtatgagaagtacttgcacatcaaaatttgttgcactactttattagctaggacaatagctctaagttatggaactgacatgggtatccaacaactgaaggataaagtgagataaacatacactagtgcatacatacacccacatgtataaatgtaaaacacattatttaataaccataaaaaatgaggtgatgtggtttgcaggaaaataaattacacttgtatataatcatattacctgttttctctcatgtgtaggccctagattttctatcagtgcacaaaatcactaaagtacagacaatgtgaaactatctaggggcacaaaggcagctagcaggtagggaaatgggtgagaaaaggaagaacggaagggtataagagctggatatatcaaagtacattgtatacctccaagaaaaagctttacataacccactacaataaaatttaaatttaaaaaagagagatcgttacctgagtttactaaacctgtgctggcaaactgaacaactttatttacaaatccagtgactacgtgtgccacaaaactgacagggagctgacagcacagcaacagcaggaaggactcacctgtcaggggcagcgcacaggcacaggccatcacattaccttttgagacgttacctgacttaatcttcccagctaccctagatgttgaagaaagcaaggcttggagatgtttgctgtttaacaggactctctgttgctttgctaacagttatttacagaagtgtttgtttttccttctttgtttttcatctgtggtgctgggaatggaacccagggcctcttgcacgctctacctctgagccacatacccaggaccttttcttctttctttatggtccaacaaaagatcataccttattaaaaacatccttgctaatggcatccatgttccagagacacatcctctctctttggaccagagcctcctctttctgtcgccattcttcctcccgctgcctcagttctgacactgcagtctgagctttggcatgttcctgatccaaggactcagagttatgcagagctaagctgccaagtttctgctgggcttcagcaagattccatttgcacgccacagagctcttcacaaattctttctgcttttggcaagccagctcaatcccatcactatacatctaaacaaaagtatcaacaacagtattagtaaggaaagaaggtggcagcaatgagacggttaactgttttccaactcagagaatctctgtgtgatgtttctggagcacggcatatctgtactctttgtctacaattgcattttacattcgtcaatagactctgagcttctttgttcatccactcccctcccctgacaactaacaacacaaagcctggcaactgtcagtaacttgcatacagctggcccacaacaagcatcagatgtgcaggctccagattcttcaccagtcggaaagcaaagcttaagtccagttcgtcagttatttatggctcctcatcctgaaaaccagaccttcagagcttcaaccttcggcttcttcctgcactgagaatccttttacttcaaagcaatcatttattgtttctactttatttctgtgttaccacaatttgtggcaatgtgagagttcaaaatagaaaattctatttataaatgattatatcatattgtcatacattaacaatccaaatcaaaaaagtaaaggttaaattaagtgctgagtggtctatcctggtgactctgctctactggagagtaataacttttaatatttgcataattacttatgtaaatgcaataggtgtttaatttcttatactctttgtttcaacaaaacctagggttttttttttttttaggatttcttggttaaaagcacaatttgatattacttactgagaaccactattctcagtctgttcccacacctgtttcagtattcaagcccttacaattttacatctaaactgtacaaatataatcctattttttagtcttcattagccattttctactagagtgctccttcaaaaaaaaggggggggacctcatgttatttactagagtccattatctgagagatgatgatgatgatgatgatgatgatgatgacaatgacaattaaagactcctgagttccagttacttttactttctggcttactcttcccactctcaataccctgttttcccttttcaccgacaatcctctgttctctatccaactcctgcccaatccttaagccttttcttatccattctctccaaacccaaagtatacacatttctatagtatgttttttgttttgttttggttattaggagatagggtttttctgtgtagccctagctatcctgaaactcactctgtacaccacgctggccttgaactcacagaaattcccactgtctctgcctcctgagtgctgggactaaaggtgtgtgccaccactgcccgacagtggttatttatttttaacatgatacttatttttctttctgactaccagctttgtaagagttagaatttaataactgttagatgaataaactaatcttcttgaacaaactgttctgaggcaggtaataaacaaggctatcctacttcctgagtctgcaggcacaacacattcaagatttctacagtatgtgtatgtggactgtggctgtttatggacacttgctctcctggttccttatttagtcactatgagggcttaaagcccagataccaccatgtctctaaataatcaaataaaacacttatttttactttttgatacactaaaaaaatttatgggtctagagagttggctcagtagttaagagcacttgttgctcttgtacagaacctgggttccatttctcccacctatatgatgcttcataattgtctgtaactccagggaatccaacatcctcttctgaccttggcaggcatcaagaatgcatggggtgcatatccattcatgcaagcaaagcactcatacacaaaacaataaaatgatttttaaaaagaaaaattagccgaagataactacactttaaaatggagccagaaaatggaggaaaacgaagctgtaaaactttatttgtaaaagacaaaactataccaataaaggcaattgtgaataaatggggtatcttcactttctaattaaacagaagcaagtatttctcaaatcaaacctagtaatagaatgatttatttttaaattattctccatagactacccttataccatttggtcattctatccaacatgcattgagacgactaagtataatgagttaaaaaaagaatgcaatgccccatgttagggtaagaacatgagctacattctgttgagctacattcccaagtcacattaggtcttattttaatcagtgaccatataaaattttagaagaacataaattttaatgaacaaaagctttgcaaaggaactgttgttattaaagtttactgttgtaactttatgtcaaaagttctcaaatagcaagccagacagggtcccagccctgagaggggtaagagggcaggggctccacccctaatacctgctagaaaagagaaaatcaccttcttcaacagaatgttactgagtaccatcaaccgtactccagggccctatgctaaggaatagttagcacaataggtcaacacaaaacaaacttaatgggtttttgtggacattctgcttcattttagtgttttaaaattttatttatttatttattcttactggtcttttgctgattttgaatttcacctggcggtggtttgttttcatttttacgagagaaataacataaaggtgggtagggagacaggtagggaaaatatgggccgagttagagtggaaaaacgtgagcaaaacaatgtacgaaaatttcaatacaaagatacaataattttaaaaaattcttaaataggacttccaaattctggcttgccttttcacacatcactagtcatactgagatagcactatctctcacatttgaccagaaaatttggcagaaaattaagccagccatctaatccggattttaaaagattgttgattgattaaacattttattgtttttaagtactaacccccaaatttaagtcctaaagctaataagaaatataagaagacttgtaattattatagatccttgggagtaatgactttgcagatttttaccactatttaaaggcttttctcatgcaaataaaatcttatagcatttctccagataggcagtgcacaagagttctagcgggaagcctgcctcaaactaactagatgacctcaggggaatctcttttaatgaaggaaataaaagcctctttacttttaaaccccatcacctaaacaaatgcaacggtaaaatgtgctttaaaatactgaatttcttgggttacttcttggattcaaccacaacgcactgaaattcctgagatcattttccctcgccacatctgttcaaactgacactagcaattgttcactttctcccactgtaataccatgtacacacagatgacaccggtgagccataattagcaggtgacgactgacccatccactctcactctcattttgcctcactttccctgtgactagctagatgtgcattgcctgcggttatgaaacagcatactgttgtgtgagtccagttaactcagctggctgacatgacaccattatcctacactggctggcagacaatctaaaacggtcgtctttatttaaaaaaaaaaggttattgttacaatattgtagcgcgttttgcaaaaaaacaaagcctaggaaaaaaaagacatctacaatcaatttcactgaacagattagtgttttgtctgtgatcttgaaatctagttcaaaacacacccaggtgagaagtcaggacaagagacgtatgtaagcagaaaacaaaacaaaacaaaacaaaaaaacaaactgtaaatgacatgtcatacttccgagtcgggaaagcgggagttgaaaaccacaagtagtatcaggaactcggggggcgggggagtggaagtctgaaagaaaagccacagtcctgtggctgtgatgttttccaccggagggacgaaactagctttacagtaagggaccaaagcgtgagcggaagcgaggctcagggaatccgctgagatgtcagcgtgggaaagaagagcgcgtgaggtgctggtgccaggactcggtgtactgttaagacaagtacagtcgctcgctgttcccagcaactgtgcacagagtagccggagcctgcaataaaaggctcgggtggaagcgcgtaccagaggacaaagggtcaacgttatgcagcctgggcggcccccgtatccccgcgctgaccggggagggagagcggggacgaggggacgtggaggccggggggtgagcgcgcggcggaaggggctgccagcgctgtgggtgggtcggtgggcgggtgagcgggcgagcaccaccgcccccgcgatgcccgcggacgtttctcctcgtcctcccccctccccgccccccacgaacgcaggcggctctcacctgggcgccgccgccaggcaccggcgggaagtgggaagaagagggggacacgtccacgtcgctctcctcctcggcctccccgccagtcctcgggaagctccaggggcccggcggcggccacggctgctccatgtcccgctggtccgggcccgacaaccgccaccgccaactgccccggcgtgagtagaacccgctgggcggagccagccgccccgccggccacggtcgttacccacaattcccctgccgtcggccgagccgacgcacgccgggagcaggcctgggccgcgccgccgtccgactgcggaagaagaactagccggccgcggcgtcatttccggtggacgagacagggcgtggcttcgcctgagcggagggctgaggtctggagccgagcgagggtccagggagactagcgatactgagggttcgggtcccggtgatctcggggagttttgccttgctcctcctcctagtgttccaaactgcagctacctcgtgcacggcagtctaagccggagtcggagggggagcgttttagggagcagagccaactttgctttaacttcaggttactcgagacaagacagttctgcaaaccctgggacccaccgctggggaggacgctaaaaatcaaacaccggagcaagcacgtttgtgaagaatcgagacaagtagacatatcggagggcttcctgtctctcatatcttttagaatcgtgaagatccatgctctcgctgtcctttttcttttttgagatgaaatgttcctaaattgccccagagcacattttaagagaaagacgcagaggcctgcattggtggcgcacgcctttaatcccagcactcgggaggcagaggcaggcatatgtctgtgagtttgaggtcagcctggtctacagcgtgaaaccctgtcttgaaaaacaaaatggggggcgggtgagggaaggaggaaggagagagagagggagggaggggagagacccaagacctgggaatgtaccttgatagtagagtgcttgcctagcacaggtaggtcctaatatcaatttctaggaccagaaacagagactgctaggatccaggcagtctacaatctcccggcctttgcttggcaagctttgtgtatgaggggttggaggttcacaggaataggctagaggaccacatcccttgtctgctccatcattcttcaccctattcccttgaaacaaggtctctcactgagtcactgagcttggagaactctagattgacaccaggcaagacccatgatccttgggtctcaatcctcctacagaggtgtaagctttttacacgattgctgggggacaacatgcttgcacaactagcattctcatccaccgagccatctgccctcgctttggttggtaaactcttgaggttagttaatcctactggttgaccaatgcacgagaaagatgtagttagaaatgctgggtaaacctccagggaagaggaacgacatgagaccatttatgcttctgttctgctcttcctcgaccaggaaaacacccgacaatatttttacagcagtggccaatgatttctctacaaagatgtttggaggtggtaaaagaatgctaaaaaataaataagtagaagcaatggaattgttcatggattaagagtaaagtagatctaagtgtgctgatatggaaatatctctggaatgaactatgtgtggtggcacacgtctgtaatcctgggaaaggctgaggcatgaggagtgtctacttaaccgccaagctgggctgcatagaccgggaactgagttaaggaaatctatgtagagtgagaacttgaatttgtttgttttttaaaggtgcacactcaaatgcatgctgtgtgtgtgtgtgtgtgtgtgtgtgtgtgtgtgtgtgtgtacttcttggaaggtatagaagaaatttaataatctcggtaactaaggccagggaggaaagattcttttactgttagcgttcctgtattgtgattgaagatttttcctacaagtatataacttttaaatcattaacaaaagttgaaaagcatttcactcaacccctgttaaagtcaggtttaaaaagtcacagggggtgaagtgtgacaggagaaaaagaaagaaaacaaaacaaacaaacaaaaccgtttttccctctttatttgaaaccacaaagtgctttgagtggtgactgacaaagaaaccagctctctgtggacacagcttcactgtaagttctgagtccctctcctcagtttccttctcttctgcctgacctcttatcttaggaatgctcagattttgtaaggggaatgatcttgtcaatgaccatagctttgactccaacatgtgggctcttgctcttttctgtgtttttaggcttctctttttctattgttttatgttctttaattatttgatatttttctctttggggtttagtaatagaggttgttgggaataacagcatctaacagcaccttagggtattaaatgaaaagcaagcttcccttccatcactctacctgaggctctttccaaaggtatacattattaagtctctggtgttcccctgccctcctgccccagaaatacttgaagcataattatacatactgtattttccctaactgaaatggcagtgtattaaatgtatttttttgttccatgcatttattttcttcttagagattatttactgttaagctcaccgctctgctcctttcttttctcatgctgtagtatccatcagcttaatatgactctatgtagtgaacatttggttcttattttgtttttaaatcttaatgatgtgacatatatcttcatgggtttttgtgtgaaagtatatccacagaatttaggaatttagtagcagaaatactgagccaaattaaaatttttgagagacatcaaatcactttctagagaagttgtctattgtaagcacaataattggccccaaagatgaccatatccaaaccatggagactgaaagtatgttattttacataataaaggggttattgaggatttaggtgaaaatgaggttgttaaccaactaatctcaagataggggaattaccagccaggtggtggtggcatacacctttaatcccagcactggggagggagaagcaggcaggttgctgtgagttcgagaccagcttggtctacaagagctagttccaggacatcctccaaagccacagagaaaccctgtcttgaaaaaaaaaaataggagaattatcttggaatctactggagataattcttcttggaattatcttggagtggttaaccaattaactttaaaataggggagttaccttggattctctgagtggtcctaacatggtcacaagaacttttttaaaaagattatcttatttttaatgtgtgtgtgtgtgtgtgtgtgtgtgtgtgtgtgtgtgtgtgtgtgcatgagtgcaggtgctggcagaggccacagcttgacttacagtgagtcaagctccatcaagtgaaccattcagcataggtggtaggagcaaaacttgggtcctgtgcaagagcagtgggtgcttttaaacctccaacaagcccagcacaaaggcagcacaaccaagacttgatttcatgtcactggctttgaagatggaggaagggagctttaagccaaggaaacctttagaaactagaaatgcaagagaactgaaaggtgccagtaccctcctgctgcctaaaattcttgcccagaaggatgcaagttagactgttgttttgaaaaactggaagataataaaaattttaaggtcctgagaatatagaaatttgttatagtagccattggatactcacacatttaaaaaattttcattcctaccaacaatatgcatttcctcataccctttcctttcattccttaaaaaaaaaaagtttctccctcacacagatgctgtttctgttatttatgatgttgggctaataattctgttttaagctaaaagagacaacttgttcatgaggacctgattgtcacattcttgctcctgattaattcactctgtggagattcccacttggggaatgcttttgttttctctgctgtggctaggatgtgaacagtatgggagatatgtcatttctgcaatgctgagccatcaagctgccctgcagaagcccgtggtagtagaagctagtcactggcatctgtttattgctacacagtcttaaggtttctactgttgtaataaaacaccatgaaccaaatcaacatgggaggaaagtgttcatttcatcttccaactctcagctcacactccatcactgagttcagccagagcaggaactcaaggcagaaacacggaggcagaactgaagcagaagccatgggggaacactgcttactggcttgctcagcttgctttcttatacagctcaggaccacctgcccagggatggctccattccctgtggggtggcctctttcacatcaatggctaatgaggacaatctccacagacttgcttataagccagtcttatgaaggcattttctccattaaaagtccttcctagataagactaggcttgtgtcaagttgacaaaaaccaactcagtacaggtagctacatcggagatgaagccattcatttgacttgacttggtgacaatctaatccttaaatctctttgcttggtctccagctgagatgggcagcatcattgattaaatggtttgcaagaagggcttgagacattatgtctgtagcagcttccacatttccgtggcatctgggagtctgagatgaccatagtcggggacaaagtaaccacaatgggaagaattaagagatctgggtggcatacgcaaacttgtgtgtgttaaccagtatatattgagtgtcacctcaataaaggtcagtgagttaaacaaaggattccaaaaatactagttggccaggtaaaggagagcaaacacagacaaaaagaatggctagatagtcaaagggaaatccaaagaactcagggtctaccaccccatccaggtgagcctagtattaacaattgttagaagagagtctaaggatatcaagacgtagaaagactgggcacaaagagcacgtgaacaggacagtgtttctagggaccaataagatctgcgttgtggagcagtgaggtggtagggacctgaactcaaacatgactgtgttattagtatatagccttggggaaaaggctgtttggcttccagtctgaagctgaaaaataaaggtaacatctcccaaagaattactgtgccaatgaaatgaccacatgcaacatgcccacctttttgtagatcttcaataagaattgatgccaccttttattttatctctagaaacttaactataaatttgttttgacacagtattagtattatcaattggtgctatccccgtgatattgcaggccttgtgccagttagctgttatgacatatctgtgctctgggtatccagagagcttggcacccatctctgtacgcctttggttgtagagaaaaatagcactaggaattgggtatagacataatgctccattcattaccacactggtattttcctttcaaaaaacgaactatagctactggtgaaaatcttcagcagtatctttttaaggacatcttcctgcatcatttccaactgcatagatctcaatgtattaataataaatcacaaaatacttttttaaaaattctattttatttttagcagggtctcatgtcgtccaggctgacttcaagcttattagctatcccagggtaactttgactttctgattcttttaacagctctaggagtacaaacatccaccaaagacagatttatgtagttctggtggacgctagactgggcaaacactaataactgaaccacatggcccagccctaatttttaagaacattatctatttacttgcttaattttttgagtcattggccttttgggaaaatttggatctgctaaaaacagccacattctcctgctgtccactgttgttttaaaaatcacataaaaagagggaaatgtcatttctcttgccacttgatacgtcttactctgcctgccacccgatggatctcctctgggagatgatgcaattcaatgcttgccttagactacttggaaaagctgaactgtatagtgaagaggaactgacagttttgatttctaactttagaaatgacctttctatttctaattagtacactgttcaatttcttatcgacagtgagaatgttttctgaggcaaaaggagacaatacatttaatatgggagtcctgtagggaacaggaaactatgctaaatagaaagtatcgcaggaatccagggaaagacagcaaaagctgagccggtccaccaccagggaggctaacaagaactggggttcccagccgagcattagcgcgcctgcgccttggcctctcttgcgttccaggggagaaggttgagcgtttgagtgtccgtggcaacctgatgcttccgccttctggaagcttaccatccaaagcttgtgagatacccgtccctgtgggagggacctgggcagggactgatgggggaacaaaggggtggggtgggaggcagggaaacttctggaaaaacccttgccttgatgtaaactaagaaataatcggttcaaggttcagcacaaaaggatctttgcggtgctttcgcccacacaggaaaggatgcctctggaggtggtggtggagctacatatccgggcggtaagagatcggccagcctgccgtgttaaccccacgttctccgcttactccacacgcatcgcttttggtacaagctgttcttctgtccctaagattttgcacgtttatcacccttgaactccgtagcttttaattcagttcaatctgtcccgtcttttatttttctttccaaaaccattatgtttcttggcttcttaaaacgatcctgactgaaaagttcaagaagtattttcatttcaaaagactttgtagaaggatttaatgttgtttctctaagtagtcaaagaatatatagtttttaaagctccactcctgatgaatgtgccacttctaggaaccaaagcactttcccttggctttgggttgctaaattcaacaggacactccgtttaacaataaacactttataattacccaccaactccttaagtgaggtgctggagcacagggactatactattcctatttgggagtcagttattcctcttgtttcaccattctcccatcatcccatttataataacaagactggcatggagtttggcctcctaattataaggtgcttcacaactggccatagttaccagtggatgctaacagggcactgcatggaaattcagctagatgccataaaacagcaaactctgtttcatggagcataatgaagttaaaggatcctagttttggttccattttactgacagttatcagttgtgctgtatcactttcaagtgctgaggaagaggaagggaaccctacaaggccaagagagctctcttacagcaaaacagaaattaagatttcatctcatgtcattcaacattacggtttaatttattttgatttttaaaaggcatccttcagtgtacaagcaattaacaacaacaaaagaaaaaacaatattttactctagagaatttaggatgatccatgaagtcagatgacttgatctgatcctattttagacagccggcaaactcaggccccagcaaacaaaaacatggcattctagaagtgtaactagaaactagaagatcagccctcagtaatcaaatctggggacacggttaagagcagacactgtctgcctgaatgctacaattaaaaatgatctctgaagctgggtggtgatggtgcacacctttaatcccagcactcgggggaggcagaggcaggaggatctctgtgaattcaaggccagcctggtctacagagccagttccagaacagccagggctacacaaagaaactctgtctcccgttccccccccaaaaccctcagcccccaccccaatcggaaactttaaacaacacacacagaccacttagaacctcacagctcggcagagttagtaagcaaagaggtagtcagtgttcagggtgttgtggaaatgcagtgactgtttactcagaggaagagctgttcctatttggtgtgcctgaccgccacccccccccccaggtcctgcttcctcctcgtgagaatatgtttagcacagccattctgtacagcccggtccacacccttgcatgttagatcacagccaacaatccattctatttataaatggccagaacaattggtcattaagattatctgacataccactgccccagtgatttaaagggtttctttccagatagagcagcatttacagatttatatagcacatactctctttggtctttccaggtcagacagtaatcagagtctaccacattatttggtcatctttggtcttatgactgggggaggcgtgtgagtgaacagctttccatgtaaacagatatttaggagtcatacctagtggtcacgtagggcaataggctctcctgaagaatttcaagttaagtgctattacctaaaatgtgctagatacagcaaagtggaattgatatgaaaaatggatagcatacagtcttctttgtgataaacacaagaaaactatgatagcacactgaaaaatcacatcacttttccattttttacttaatagaggaccatttgctctgttgagtagagatgatgggcagcagggcttcatctggtcattgacatctatggtctgcctacttccagactcttaacttccccagcctctccccagcagctcagcttctaggctacctgctatgcattgctactggttgtcaacagaattaggaaatgaacagtagtctcatacttacttttctttgggaaccttagacaagcccactttttgagtatgtcttctttaacatctcggtttgttctaggaatgctaaaagactattaaagagtaatagaaagtaaacatccacaggcttttgagaggtataggaagaaaggcaattactgtatgtaacctcttcttactacctaatccacaaaggtgggagagcttgttatgagcaatcaggagaaagagaaagctccaattatggcaacagatgttcagaggatgaactggaaaaatcagccttagactttaaaaatactgtttaaaatctaccacagggaaaggtctgggaatagcacatggtttatctggaagcttgtgtctcttaaaattcaatttacaagtgataacattggtttttggggggattactaattaacacaaatctgtcaactttaaataaatagcaatcatataatcagtcagcttgattcctttgcatttgtcttggagataaacagctgttgaatatatacacaatagactttctttctctagtatagctgttttcaatactagcccgcatgtgctcccactaggaacatgtcaagacagtggggtcccagaattctcaaaggtgcctgaagtgtctgagagtgcctggatggctctggtttaggtcagactcctcgaaggtggaaaccttcagacctcctggtgccaacaagaagaaatggtgtcactgttgattccacagtacaaagagaaccggaacactgtggggtgacagccagcaataatccacaatgctgtacagcatgtagcctacaaaaaagccaaaagctacatcagtgacgttgtgccgcccaagcatgaccctggagaggcctaagacgaaggcccacagtaccaccagcaccctcagtggaatggccagcaccagatggttcagaatgaaccgcgacactagggcggccctggtggtgtggcccgagggaaaggagtacttgtccaccgagagggtgaaaaacatgtccatctgattgtgcgctggtcgacgcctgcggaccagccctttcaacacagccaccaccagcaggtccaacagcagggcgaagagcaggttcatcagcacttcgcgtccggcccagctgtcgctcctaagcaggcagtagagggtgcccagcagccaggggatgccatgccccgagatctccagcaacttcatcaggggtcgcacgctgccccaggccgagctttccccggcgcacacccccagcttcttggatagccacaggtcgatggccagcagggagcgcagggcgatgcccaggaaggacgggttcaagttcatgcggtcgtcctcgggcggcagggccggggctgcttgagcggggcccgcggaggccagcgggaaggagccgcaccggtgcaccgggctgtcggacgcgcgcagccgggcgcaggcaggatccgcgcccgcacgggagctcagcaatgactgaaactcgaacctgccaccgccgccgccgtgggccgggctgcccgggacgctgttcccgcccgaggcgcccagcgaccgtccctcgatggtcctccgggggctcggcatcgcggcgggcggcggtcccggggacccggccagttccgagagaggcttcccggctccgcagcctcttccgcttccgcactcccatcctggagggcgggccgaggagccgcagagcacgattgtgacacctggtggagacgtgggaggggaccggaatatccagctcgaggagagttgggagggtggcgatgttggaaaatatgggtgaaggatgcagtgatggggtaatttcagaggctgtgggaggttaggagaaacaaccattctgcacaaaaacaaaccctgattgccctcctcttctttttaagatttcttgcccgggagtgttcctgccggacaaggaaagtgtgtaccttggagtctacctcctgaatcagtacctggagacagactgctttcgctctatgttccctattgagattcaacagagcatgagatttgaaaaggtgatcttgacttctcagtgggttgtgctgcctggagtcagcatacttagttactataaaaaataatggcttttgtacattcttttccttaaaaaaaaaacaacaaacaaacaaacaaacaaaaaaaacaaaaaactgaccctaagacaattcagtataatttaaaagtacagggagtcttgaggcaaaaaccatagtctggaagacttgcttttgctttgcaggtccgagccaagttctgtcaatcgagtgctaaataccctggtgggtgctttctattcttggagctcccatggcgttttctaactggagcagagagcgtttctgaatgttcttggaggtgttagagacagttgcattacatttatgaaaggggctattaataaactgcagaccttaagaaaaaaaactttctcaaacccagaaaaataatttaaaactataactaaatcagttaaatcttgtaactaaacacaagaaagtcgtccatgttttctgagttaccttaagtgtgttatgtagctagtagtaagggctagattccattccaatgaatgcaatcatgatttaaaaaaaaaaaaaatacggccacaacactagccagggcttaccactacagcgtgctgtagaatattcatcccatttcattactctttaatcaccaactattttggttttggatttggagatgaaatcagagttctctttcgtaagtctaatgattttgctagtgtcactgacaggggactctggtgcagaggaaagactacatcacattgctttcaaaaggtctgggaaatggtgcccagaaacccacctgtctcttttgactcaaggatgggagaaaagatgaagatggtaacattaaaaaaattacaacccaggggctggagagatggctcagaggttaagagcgctggcagctcttccagaggtcctgagttcaattcccagcctccacatggtagctcaccaccatgtgtaataagatctggtgccctcttctggcctgcaggcatacatgaaggcagaacactgtatacataataaataaatagatcttaaaaaatattacaacctattcattaaaaaatatgcaaactgattgggtaaaagagcaaatagttattaccttagaaaatacattgaaaacccagatgattcttctggccatgtgcaagcaataggtatgatgaaaagtaggtagcttttttcctcccaacattttcttcatttatcagtttcaatagccctgtagaggacttctaagatacatctgtaagaagcccatagatacaaaattgtgcaagcacagaatgatacatccatcaaccaccttgggaacgtacctagtctaacctcctttgttttttaaaaggagaatgtctgagactcaaactttagatgtttccctactgctgtgtagaaacactgttggtttgagattactagttgagtataccatttttttctttttctaaaactgagttgtttaggcttacattctagtttctcctagttccacgtttcttgcaatcgtcccgttctttagcccaaaatacttatagcaagtagcaaaagcattttcttcccccacagcctgtttgcatgactcagttttgaatacttgaaagcatctggataaacaaattcttcaaaagaattcataagccattgtatttgaatagaccaagctgactgctccctagatcacatataaggaaaccctttcatgggatatattgggctcttagaggtggcatacagaagtaacccacagacagccaacttactgttacagtactgagagctggaagacagtggaatgctgttggaaccttggtacttctcaaggcaggggggatggatgctttactgatttagagcacctcaccccaatattcaccatgtaacctttgttctttatagtgcatggagttaaaaacattctgagcattagacaagagaggctctagttgtttaagtcaaaggaagatttgtgtgaggcagagacttcctggatgagaagtgtcaggtgatctgtgcttggcctgcccactctgaccaatcaactacatttgctttctctgcttggcatgtcagagtagaaaactctctgcccagtttataacaggggctccttctgagctctgtctggttcatgaatttttcctgctcaagtacattcatgaatttttttagtttatttttaactttaaaaacatgattttttttgtgctcaaatactaacttaaatgaaaaaggcatcaaccatgtgttagatgcccaatctactccagtatgacttcattcaaattttaactaagcatatctatattgaccctgagatactggggttagatgccaacctgtgattctgacaggtacacaattcaactgataatagtgtgaaatggaaggatgtagctacttaaatagtttaggcaaaaaaaaaaaaacccatgttatccacatttacttaataaatgtaagcagcaaagcagtgtccatttttgcccttaaaagaaaactggctttgaaacctcaagcagaattttatccatgcttacctttaaacatcatttaagtcagaagtttaaaggctaaaggtattgctgaaaactactgaaaatctttttttttttttcataaggtccctggaggcctgttctgtttcagtgctgcctcagaatctgttattttaagcacaaagtatgcagatctgacagcatttaaggtgaaatagtaatgtttctctgtagttgatggtagagtttcctcctcaccctgccactacttgtctttgatgttacatatggttaaaatttctgtttgtcttcctgtttagcataaccgattgagtgggcagagaggtcatctagctaacacttgatgagtaactgctgtatgcagaatgcttttctgtgtactcaagactcaggttgatgcaaaatgtgtttgctggtacagtaggtcaaactgatggcattttaagcatgtgatagatttagctaactcaacttattttgcacttattattctgataactttaattcttctgtgctttttgttgtactttcaccacacacatcttaaaaatgttcctgttgaaccctaaaatattgtatggcttgatgttctatatgctaattacttgaaagaacataaactacaatttttaggaataccttttactaaaaaccttgaaaatttcttttccttgattttctctatagaaatttgaaaatgcaatcgatcccggagctgttgcagaaattttagaaagtaggtacttaagagaaaaaaaagactcatatataattcataggtacagaattctgatgcttctgaagtatgatatttatgtttcattaatattcaaatttagggaaattctagggtgaaatttggttcatgatttatttgttgtttgtttgggttttagaaaaataatcttgctgtgtcatctaggctggccttgaacttccacctgcccccattattccaaagtattgggattatagacatatgtcatcacagcaatctttaaattttattattattattattattattgtgtgtgtgtgtgtgtgtgtgtgtgtgtgtgtgtgtgtgtgtgtgtgtgtgtatgtgtatgtgagaatataggtgcgagtgtgctgtgtgtgcttgagacaattagaggacaatggtgagttgattgcctccttccatcatgagttcttgagatggaactcaggtccttgggcttctttgcccactcaatctcgccacccatcacacctacctcaagtcactttttaaattgttatcaacgttttttctcaatgaaaccagatgtggtggcacatgactctaacctctaacttggaagttagaggcaagaggaccaaaacttcaagtttaagtttgataatatatctagcttgaggatagcctggccacatgaaacattgtctctaaaaccacccaaaacaaaacaaaacaaaacaaaaactctcaaaattttatattataatgtttttttctggatgatacgattctgtttggttattataaacataaagtggattctgtcacagcaatcaattagatcatttgatcaattagaacattttcagtgccacaaaaagaaacacttcatctgttagtggttaacttcttatgcatctattactgtccgatcaaatgcaaatgtcaatttctccaccccagagcccaggctggcctcacactcctttctctgtctcctgagtgctggggttacaggaatgttccaccattcccagtgagcagatatccgcttattctagtatctcacatggagtgtgtgtggcatgtggtcctctatgattggcttcttccaattagcatcaagttcattatattacagaatttgtcagtacctcattctttaacattctggcatatgaatttaccacattttgcttttctagtcatcaattaatggacatttggtttgcttatgctttttagactatggtgaataatgatgttgtgaatatttgtgtataagtttttgtatggaaatgtgttctcaactctcttggacatacacatgcacgggcacatatacacatacatacaaacacattcatataagtggatcatatagtaactcacagtatgtttagtaacctttaaagtctcttacactacttaccaaagcagctgaaccacttcataatgaaccagcagtgtttggagggttcattctttctccgctgttttggctaatattttcttgctgtcattttgattggttgaggcctgtgggtttgcagtgcttgccattgtttttgcatgtctctaatagctaatggtgttacatgtactttgaagaaatgtctattcatactttcttcctactttttaattggattgcgtttctctaaaaccgagttaaaagtattccttctaaagaatcccaagactttcaaatgagagaaaattcctaacatttgcctgtgtctctctttcactttatgtggtgatctacatacagttacatctattttctactgctagtaatgtgcatgtattcttctttgtctgtgagatggtttgaatgggaacagtgccataggcttatatgttgaatacttgctcccagttggtggaactacttggaaaggatcaagagatgtgatgggatgtgccgctgttaagggctttgaggtccagtatttcttcctctgcctcctgcttacggctcaagatgtgagctcccagctactgctcactaccatgcctgcctgcctgttgccatgcttcctgccacaatggcttatagactctaaccctctgtgaccgtgagccacaaattcaacattttcttttacaagttgccttggtcatggtgtcttatcacaacaatagcaatgtaaccaagatggcatgaacaaatctctgttgtgtatggaccgttttctttattcatccgttgatggccagccaggctgattctaaagctcagctgttgcacatagtgctgcaataaccatgagtatcgatcctggtggtatgttgtcttgagttctctgggtatataccaagaagcactttatctgtgttgcatgatacttccagtttttagggtctttttttttcttcctgagcaatctctataccaagtggattaattcacattcccaccagcagtgtgtaacagtcccctttccttttcctttatcccttcccttgccttccctttttccctttcttcccctttctttccctccccttccctccccttccctcctttcccttccctccattcccttctcttccctcttctcccctcccctcctttccccctcacttcccttccttttcctttttcacttcccttcccttccctctcctcccctacctttccctccctcccctcccccctctcccctcccttcccttcccttcctttcccttctcttcccttccctcccttcccttccctttcctcccctcccctcccctttccttccctcccttcccagattcttaccaacatttgttattttcttaataattaatttgattggagtgagattaactcttcatgtagttttaatttgtgttctctttatgcctaaggatgttgaacattttttccattttttttttgaaactaggtctcctataagccaggctggcctcagactcactatacagtcgaggatgaccttgactcctgattccctctccacctcctaagtgctgggttataggtgtgtgtcctcacacctgccctttctcatattgttcgtttgtgcttcatcttttcactattgtgtcttcttttcatcagtccattgttgattggtggtaacaggagctacagcccaaagctgctgcggggccacagacccagacatggttcttggcaacatcccagggcatcaccatggctctgggtggcaagtcagccacccacctcagcctgctccttactgccttcattgtttcagatatgcctctttccacaggacatgaaccattctctctctctctctctctctctctctctctctctctctctctctctctctctgccccctctctctgtctctctcataccctaccatgtttgcttaccataataatttctcctctctcccccaggcagccccccctcccccgggcaggcatgtgggtctcctccctcccatcctaatgcactttaggtatcttgtgtgtgtggcttccatttgaatatttctgtgaagaatgccactgaaattttgatggcaattgagctgaatctgtagatcacattttgttatagtcattttcattatattctggcaatccatgtaaacatgggtggtttgttcatcttccaggttctctccgcccccgcccagtatttcaaagcttattatatgtggtgatgcatgtgtgagtatgtgcacaccagtgtgtgtgtgtgtgtgtgtgtgtgtgtgtgtacacgcacgtgcgtgcgtgtgtgtgtgtgtgtgtgtgtgtgtgtgtgtgtgtgtgtgtgtgtgtgtgtgcctgcccatgagcatgtgcttgcacatatgacatgtgagtgtgggtgcatatataaaactcaaaggataactttagaggttggttatctgctgcttctgtgggttctgggaatttaactaaaatcatcaggcttaagtaacatacactttaacctgcgaatcacccctcctggtccaagatttaaattttagtcttgtctttatagatataataacctctttaaaactactttaatctcaaggaacatagtaagatacattttataacacatgtatagccatacagcatgctttttaggcaagctaaagttttgcattaatggataacataatatgatgttattttagtgctctatgaatatacatgcttttatttatgtgtgtctgtgtgctacgtgtatacacaagtgcccagaaaagcaagagaggggattatatactccagagctggagttacaggcagttcttagctgcctgacacaggtgctgggaatagaacttgggtcctttgcaagagctgtgctctctctctttttttctccattttttaatttgaattagaaacaagatggttttacatgtcaatcacagttccctctccctcccctcctcccctgccccccctaacaccctacctatcccatactctttctgctccctagggaggatgaggccttccatagagagtcttcagagtctgtcatatcctttgggatagggcctaggcccacccccaagtgtctaggctcagggagtatctctctatgtgggatgggctcccaaagtccattcctatactagggataagtactgatctactacaaagggcccaatagatttctaaagtctcctctgtgacacctacgttcatggagtctggatcagtcccatgctggtttcccagctatcagtctgtggaccaagagctctcccttgttcagatcagctgtttctgtgggtttcaccagcctggtcttatcactcctcctcctctgcaactggattccagttcagttcagtgtttatttatgggtgtctgcttctacttccataagctgctggatgaaggctataggatgacatataagttagtcatcaatctcattatggggggggcatttgaggtagcctctcctctgttgcttagattgttatttggtgtcatctttgtagctctccagacatttccctagtgcctgatttctctttaaacctacaatgtctctattacgttatctcttatcttgttttcttcaattcttcccccaactcaaccttcctaatccctcatgtcctcctcatccctcctgtatattgcttttattatgttgaggggtatgttcctgttattcctgttctctccaatatctttatcaggaagcgatgttggattttgtcaaaggcttttcagcatttagtgagatgatcatgtggtttttctttttcagtttgtttatatggtggattacattgatggattttcgtatgttgaaccatccttgcgtccctgggatgaaacttacttgatcatactggatgatttttctgatgtgttcttgggttcgatttgccaatattttgttgagtatttttgcatcaatgttcatgagggatattggtctgtagttctcttttttagttgtatctttgtgtggtttgggtatcaaagtgattgtagcctcgtaaaaagagtttggcaatgtcccttctgcttctattgtgtggaacaatttgaggagtacttgtattagctcttgtttgaacttctggtagaattctgcagtgaagccatctggccctgggcttgttttggttgggaggcttttaatgactgcttctatttcattagggattataggtcgatttaaattgcttatctgttcttggtttaattttggtaagtgatatctatccaggaaattgttcatttcctttagattttcgaattttgtggagtacaggttttcaaagtatgacctgatgattctctggatttcctcagtgtccgttgttatatcccccttttcgtttctgattttgttaattagcatgctctctctctgccttttggttagtttggatagaggtttgtctatcttgttggtcttctcaaagaaccaactctttgtttcattgattctatgtaatgttttcctagtttctactttattgatttcagccctcagtttgattatttcctggcatctactcctacgtggtgagtttgcttctttgtgctctaaagctttcagttgttctgtcaattctctaggatgactcttctccagtttcttcatgtgggcacttagtgctatgaactttcctcttagcactgctttcagagtgtccacattttcattaaattctaggaagtctttaatttctttctttttttttatttcttcctcaacccaggaatggtgcaattgggggctattcaatttccacgagtttgtaggttttctgctatttgtattgctgtcgaattctaactttaaagcatggtgatctgataagatacagggggttgtttcaattcttttgtatctgtggaggtttgctttattgccaactatgtggtcaattttagagaaggtgccatgtggtgctgagaagaaggtatattcttttgtgtttggatggaatgttttatagatacctgttaaacccagttgggtcataacttctgttagatcctttgtttctttgttaagtttctgtctggtgatcctgtctggtggtgaaagtggggtgtttaagtctcctactataagtgtgtgtggttttatgcgtggtttgagctttagtaatgtttcttttgcaaatgagggtgcctttgtatttggggcatagatgttcaggattgagacttcatcctggtggatttctcctgtgatgagtatgaaatgcccttcttcatcttatttgattgattttagtttgaagtctaatttgttaggtgttaggattgctacaccagcttgtttcttgggcccatttgattggaaaatcttttcccaaccctttactctgaggtaacacctgtctttgaagttgaggtgtgtttcttgtatacagcagaaggatggcttctgtctttgtatccattctgttagcctgtatctttttatgggcaggttaagaacattgacattgagggatattaggttcttgtttgttttggattcattgttggtggtatcattgtgtgtgtattttgccctcgtgtttcttttcgtgtttggtaaaattggattatctattgcctatgtttttgcgcgtgtagttatctttgttgggttggagtttttcttctggaactttctgtagtgctggttttgtggatatgtattgtttaagtctggttttgtcatggaatatgttgttttctccatctatagtgattgaaagctttgctgggtacagtaatctgggttggcatccatgctcccttagtgtttgtagaatatctatccaggaccttctggctttcaaagtttccattgagaattcagttgtgattctgatacgtctgcctttatatgttacttggcccttttcctttgatgctcttaatattttctctttattctgtaggtttgttgttttgattattatgtggtgaggggacttcttttttgtggtccagtctgtttgttgttctgtaagcttcttgtactttcataggcatatccttctgtaggctgggggaagttttcttctatgattttattgaatatgttttctgtacctttgagctctattttttcaccttcttctatacctattattcttaggtttggccttttcacggtgtcccatatttcctggatattttgttaggcatttgttggacttgagattttctttggtcatgactgtatatcctctagcgaatcttcaacaactgagattctcttttccatctcttgaattctattggttatactcacatctttagttcctgatcctttatccagcctttctatttccagcatcgcctcattttgtttattgtgtctatttcagctttcttagcttgaactgtttcaagagcttccttcacttgtttggttatttttttcttggctttctttagattctttaagaaagttgtttacttcttgaattttttggtttgtcttttcctccatttcatgtaactttttgcttgttttttcttctatttctttaatggattttcttgtttcctctaaaaaatgatcttcctaagataatttttgaggtccatcttttctttatcctctgtgttgggcttttcagatcttgctagtgtggagtccctagattctggtggtgtcatattggtctttctgatgttgagtgtgttcttattctgtcttcttcccatcccttcttccagtgagtgcaggtggggtctctccctctctccggtggcaggcagagggctcagcctcatgtaattttttgcttggtttttcttctatttctttaaggaattttcttgcttcctctttaaaggtctcaatcatcttcttaagataatttctgaggtccatctcttctgcatcttctgtgttgggctttttagatcttgctggtgcggagtccctagattctgggtgcaggtggggtctctctatctcctcttgtcactgggtggtgtgtgtgggccaagacttcaatgtctgcagctctggatggtcttgcctctcctggtagtctcctcacttggtaggggtcaggccttggtaggggtcagaccagaggagggggaaggaagagtgaggtatttccaggctcagggagctcctccctggctgggcgtgtccactccaagcagacacaggcccagagagatctggggtgaatgggattttgggcaggagtaggcaagagcagagggtacactcatcttggtaggggtcagtctggcggagggctcatgaagatgtttttaaggtcattctcttctgcttcatctgcgtggtgatgttcaggttttgctggtgtaaggtccctagactctggtggtgtcatattggtttttctgttgttgaatgtgtttttatattgtcttcttctcatcctttcttctggtgggtgtagaaggagtctgttcctctcctggtgggtacagccaaggttcccttctggtaggggcaaacagatccaatactccgatgtctctcctcttctcgtggatggaggcaggactggtaccgggggccttggcagtctctgggtgtgttggatcccaccaaattgggatccgctgtgaggggccccttggcctcaggtgtccctgagcagggcagatgaagaaagggcccgtatgctctcttgacacagccatctttcatttaagagacaaaatattatatactttttaggaagtaaaaagctaaatttgtagctcattcatctttgctccactccctcattttatgaaaatctgtttcattgttgccatgacacttattttaaattatatgtgttctttggttctttggtgtccttagaaaaatggttccaggacttccacacataccaaagtacataggtgctcaagggccataattaaaatgatgtagaatttgcctgtagctatgcatgaatatgtgtatgtgtgcatgtgtgtatatcccacataattgagattatctctgtattatatactgcctagaggtgttattctgcattgtttagagcataaagagaaaagagtgcatgttagcacagatgtgagtactttgtaactgttgtctgtctgaagttgcttaaaaaatagttaagactctgtacatgggggcaactttattattttatcaatagtgtaaatgagatgcagtagtttactttagcatatattaagaaacagacaatttttctgaactattaaaatgtcttgtttcttctttgtttttttcatttttaggtttcctaaccaggtttgaattgatacagctagtgtctccaggtaatatgcctgtaaacatacttctaaacttaacaattttactttgaaggattttgacatgaaagaatggggacggatttccgttttctttatgactgaatcatttctagtgtatactctataccatcatctttgataggtataaagaatttcattaatgtgtgtgtatgtattcctgaggactgaacccaggacctcatgcatgttagataagcactacaccctagactttttaaaaatggctttaattttgaggcaaagtctcactgaatcacttaggctgactgcgagttcatagccttctcgcctcagcatacattcccatcacctgctacttgtgtgtctttacagagtatgaacaatgtgaatatatagtattttgggttttctttactttgttaccagagttaatgtgtttgtcatttttaatagctatttccaaagtattattattaccaaattgttatttatgttttttgtctttcacataaccatgaaaattattatttattcctcttttagtatatttacagagtagaattcccagactgacctatgctttgtgagcctgggacaaactggatcccagtagagcatgcctgtgcctcatgtcttggctaagctgggcattatcatttgaatttattacatttgaattgtacaatagtttatatatattttaatcatatttaataccccttattttttagatgtgatgtgtaatcctcaatttaaattttccttcttagaagcctcaatttttttccttctggtcattgttcttgattgactgcagaatgaggtctggatgtaagcatttccctttgttataaatttataatatttttattgaagtctttaatcagttctgatcagtttgaatgcatttctccttttcattgcaccattttgatatttcctcaaatggactttttttccccctgagagttactgagaaaagagtagtgacctggatagaagatatctcagctaaagggggcaggttgcacacaggcttttatgaaggctgtggatctacccataattggatccctggggcaggaaaggggccccagaaaggggtgttgagctagggacttgcttcttggttctttagcaaaggtagccctagaaacagataagaaggcaacactctaggaatatagggattgaccctccaattattgtagtgtaaatctagtgataggcaattggatattttagtgtgaactagggataggcacttgaatattttggtgtgaatatatagacagatgttcaactattatggtgtgaatgtggggattaatgctctcaacgtggacacagatgttgtagtctgaatctagatacagtcattaagatattagtgtgaatccaaagataaattcttgaatttggactatggatgacactcaagtgttactgtgtaaatccagggataagcatctgaatgttatggtgtcaatccaaggataaacaagacaccaagtaaccacggtgttaatctacagattatggtgtgaatctaggaatagatacttgaatataagccgggcattggtggcgcacacctttaatcccagcactaggaaggtagaggcaggtggatctgtatgagttcgagaccagcctggtctacaagagctagttctaggatagtctccaaagccacagagaaaccctatctcgaacctccgccccccccaaaagatacttgaatataataggatgagtctatccattcaaaaattattcgttttggtcaacaatacagagcaatgcctccttcctgctattcagaaattcttactgaatggcttttttttttttctagacaaaaaaaaaaaaaaaattgacaggctaaaaccaggccattgagtttttttccataagttttttttttcttgtttgacccaattttatatttaagcatataaccctgtgaactggcaagttagattttatgttaatagaataggagcatgttaattttggtcttacttaattttgtactaattaaaaaaatcacccaatataaaaatttcaactaagacatgattagatagactaaaagtaaaaaagaacccattaattaatgattcctgacagatactttattggcaatttgctatgtattttttttagactttttaagaaatgcaattagtatataatgtattggcatataaacctaactccaaagtaaaacacacagcacctatatacaattatctgtcctataataggatactgtgtatatatatatatatatatatatatatatatatatataatgaatatatacattttgaaacttacttttcagaattgtacgtgttttggattattgctgactttgaacgcatggtccctcctgtctcaccctgctgagtgctaggatttgcagatctttcagatgatcatatatccatctgtgaggttataagaacagccgctagaaagtgaagactggggaatatctgagctgacagcatgcatacaactcacaagttacagctgttcacaactgtttataactcaaaagttaaccgtatgcaaaatgggagacttgtggtacttgcttgcttgttgtccatagcccttcaatttcagactgtgattttagtggcactcagtttgagttattgaaaataacaatttcactcagagccggatactgtgcatattaatcagttaattacctgaacgtggcatatggcagcattggtggtccttggtactaactggctaaaagaaatttgcttaaagttgcatgtaaggtcagatgtaccgtttttgaattctcagagactagttcttttactcgccaacccattacctctttgttttgctgtaggcagtatactcttgtgtttttttttttttcacagcatcttcagacacacagtcaaagggcatttggccatcagattagagatactcatttctatgagtagtgatgctcatttctgtttgtagcttatggtagtgactaaagagagccagggacgttgctcccaataaatgaagaccagcctctggttgtcagtttgcaaaggtgtgagaaagtgacagacacaggggggcagtgtaatactatttgactatgcacttggtgctttctttttattaacatcctaagctgatactttctctttggcaaatcatatagagtcagtacaactgtaaacccccctttcctgggcacctgtgtgctgagtcagagctcagtttccaactacagtcagtaatggtcactagaaggcagtaagggaagacagcctacagacatggctttgaattcctactttgccatgtggcattatgacaacagctatgttaaactctcagtctcaaagagaacccaatgagctactctaccaggaagcatgtgttaactgtcatatgctctagaaacgcaagatagttttcaaactggtgctattcctaacattttcagtttttgtagtctcattgtttccctttggggaagaggctattcactgatttcacctttggcactgatgacgtcaatgtctatgtcatcagctgattgagaacacggagtgctttcagccacatttcttggctcatataattagcagtctgagcactctcattatttattgccttggctctgtaacatctcatcatgtgctgacatttccatattggccaccatttgggttactgaaaaattatctaactctggagatggttttaagacacttgatagccttctaacgagtttataaccatgcttcagtcttatcttacctttctgttgtaataaaatctctaacaaaagccacccaggaagaaatgatttattggggcttacaattcatggttatagttcatcagtgaagggaagtcatagggtcagctggtcacattgcatctataggcaagaagcagagagtagtaagtgtttgtgttactttcttctttttatatagttaaggatcccaactcagggaatggtgccaaccacagtgtatggctcttactacctcgattaacctaaccccactggcatgcccagatgccagtctcccatatacttctatgtctcattaagttggcaataaagattaaccatcacaactccactctagtcaacttgatacccaaatacatcactttaaaaaggtttacttgtttatgtattttatgtatatgaattctttgtctgcatgtattcttgcacaatagaacagggcattggatcccattgtagatgattgaaagccactatgtggtttctgggaactcaggacctctagaaaagcagactaaccagtgctcttaatctctgagcaatctctccagtcctttaagcatatcatttaaaaattcattatttttatttatgaatatatgtgtttctgtgtaaatatatgctatggatgtatgggagcctgtgaaggctaaaagatggtctattcctcttgaggtggagttataggcagttgtgagacacccaacatgagtgctgggaactaaattgaggtcctctggaaaagtaggaagttgtcttaatcactgagtctcttcaggtccaccttaatgtatcactttgaatcataatcttccatcccttgtccccaaagtctcaagttcatctcataatatggcacaatccatcttcaaaagtttcctttgtctttaataattccaaaactataaaagtctatgtgagactcaaggcaatctctaaactgtgagtccctataaaataaaaaaaacaagttgtacatttccaacatagaatgacacaaaatgaacatccacatttcaaaagtggaagaatcagagtatgggaaggaatgatcaaagtgagaccaaaatccagcagggaaaacatcaaactctgcagctccatgtccagcatctggcacatgataaaactggttgtgctccaaagggcttgggtagccccatccctctagatatgcaacctgtaactcatgtaagttctctgttggtctgattccactccatgcccacagtaactcttggtgggtgtgctacagtcatggcctctccagtatcttggcattttcattggaacacagtctccacatttacagcttcatctgcacagtttgacacagtggcctctcaaggcctccttgcaagggactctgactctaccacacatttactggactcagacattctctgaaactatggaacaagatttcatgacaccttcagtctggcatctttcttgactctaaaaccaatagtatatggatgacatttccaagtattacagccagctcaagatgaagcatggttctcttggactatagctgtatcaacttaaatgtgacgatcctgggaaatattcccctaggactatttcttacttcaaggagtaaggaacctattcagtttaggctttcttccctcagttatgtttgaatcttcctaagagaacttttaccgtgagtggggttttgcccttggggcacccagcctgttgtctcagtgcatgtaggttgtttctcctcagggatcatctctttaatgattacaagtgctttctcactgttctcactaccaatatgcatcttctcctgtcttgacattccctccacaaaattagtctattttgaaatagacttgaaattcaacttcactcaagttctcaggataagggcagaatgaaactagatttgtgcccaaaatatcacacaaatggccattttccagttcttaatagagtgcttgttgcatgagttgggcctccactgtttgcattataatgaaacaggatgcattttagaatataacactgggaataatgatgtatttaaatgtgatatgattttcaaaatgtcaaataggcttagtagaaacccaaacaagaaaaaaacaaaattgttcttttatttgtacaatacccacatgtctagaaaagtcagtgtattataaaatcatacaaaaagttctttgtagtatagctttaagtcccaggctcagatgatcattagattatttttaacctaaagaaatgtctagtaagacattagaaagccatgcatggtagaaaaaaatatgtgggagtgtcttgagctccacaggacattgaagcattgctgattccttcttgtaaatgatcttaacatatgtctaaatcatcactaggttgataccatcttgccaagaagtctgcttgctctctgagctactggcacccctgtgcccaaacatacagagcccacttaaactataagctttgtgtgagcatgattgtgttggcctcattcctgtctgctttcagggtctgactcaaaatttatcttcaatatatatttggtgaaggaaaggatggatgggcagatggatagatttattttgttcaattttgtatagcaaccttccattttttttcaagaagactatccatgaggtaaattatccacaagataaaaagtaatagaaattaacttatttttgaataacaaatgctaggttcaaaatatctagtttgactcaagtgccctctctgacaccattggtcttagttagggttactggctgtgatgaaacaccaaagcaccttgcagaagaaaggcttcatttggcttacatttccacatcattgttcatcctaaaaggaagtcaggacatgaacctggaggcaggagccgatacagaggccatgtaggagtgctgcttattggctttctctccatagcgtgttcagtttgttatagaacccaggaccaccagcccaggagtggtactacccacaaaggggtaggcgctcccacatcaatcaccaattgaaaatgcactacaggcttgcctatagcacagtctcaaggaggcattttctcagttcatgttccctcctctcagatgactatagatcgtgtcaagttgacaaaaaactaaccagcacaccatctgagtatctattttgtgaaactcgaagggtgtagagtacattcacttatgctttttctcttttccttctagtatgggaagagctggcctactatgaagaaaacacacgcaattttctattccctgagcccaagctgacatctttacaccttggcttggatagagaggtgctcatgaagacagcaataggctttccagtgagtgaccctccccacttgggcttctacagggagagaaatttttggggcttgaacattttattcctgacagggttgatcttaggcaggtagctttgtcttgcttagttacctcagttctgttttcatctatggtcagatgctcagatcatgataccaaactataccgatttccactattgatacaataagagccaaaagttttattatctaactaaactatatcattgccatagtcagttgtcacatgatatcataaaaggttcctctttcaactacttcttattgcagattgacagaaaggtctgtttggtcatagctgtttttactaaatagagtaatgacagaaataatattatctcgcatttgttttataccttcaactttctacatttttagttattctcttcctaatttgcaaattagccaaggctgatattgtcaatcagttctgctttagcagaggggaactgatagaggccaatgttgttgaggaaccatgcatggtgcagcagataggcagctaataacctgtttggtgccatttatctgaatccaaacttgttgatggagttttcctgtcctgcagctaacacactgaggcttatattacttataaatgctcagcaaatagctcaggcttgttattagctaactcatattttcaactagcccatatttcttatctatgctttgccttgtggcttggtaccttttctcagtacagcatgcccatcttgcttctccctgcatctgctggtgactccagactcctctcttcttcccagaattctcctagttaggctgtctctcccagtctcttcctgcccaactataggacaatcagctttttattaacaatgagagcaacacactttcacagtatgcagaaggattattccacagcacagactcaagacattcatttgatattatggtctatgatttctgtctttgaaacaaccacttttttttttttttagtgaatttttatgtcttttagatgacctcccctttaagggccacatgtttgtgaattataaaaagcataattaacacgtaggctttctgtttctacactgtgatttcctgtcttatcatgtagagaagtgtagctgtccccaacctgctgagagttctcttcaagggtgcaattgtcccttcaatgcttctgatgatggatatgtaagccaaacgtcaacattcatcgaaagttatcctaatcagaatcccaaatacctataactttaagccctctttgttgtcttaaggggtctggcaaatattcctaaaaccactctttatctttctccaacatcaccttcatctatcacttaagtccatggtacctgtgagatgctaacctttattacttcaattattggcgtgttgccctacagaacctaaaagggaataaaagttaatgggaatgaaccagcctgaggaaactctcacattaactttgttttcctcaaattccctgttaaataaaagccatctttaaaatcaaaacaaggagaaacactttcttttcctcaagtgtcacatgttgaatattctgggcatgaatacaaagattattggatatgaagttgtatttgtagttatctctatctatctatctatctatctatctatctatctatctatctattttggttttttttccgagacagggtttctctgtattgctttggaggctgtcctggaactcgctctgtagaccaggatggcctcgaactcacagagatccacctgtctctgcctcccgagtgctgggattaaaggcatgcaccaccaacgcccagtgtatttgtagttatttataaatgaaggtgattgtcaggaaaaacctttaaaatgcattgaaatgccttcacacatggatatcaattcttgtaattgagtttatcagactctatgaacaatttgatagatagataaaaagatagagtggttcaattcctctgaaacatttcacaaatcaaaactgagccacttgccagagtttcagtgtcagttggtgtgcatggtgtgtgctgagctcataacatgggttgttttgttctgccatcctggggagggacaactgttcctttcctcatcatatggaatggagctgctgtgtatcagaaatgtacctgggctcgaagaacaggaactcttgttctttggggtttatactcttagccacaaacatgatactaattctcttggatttatttgagttcactcttcttggtttctattacagctgtagaaaatgagatgcatgacctaagtaggtcaggcaaaccattcatctgcttactgtgacttatcagttcattagcaattagattgattttatccactatggtggcgtttttctttgtattcccatacattgtggtttacttcactttagacttcaacagtcatttagatgataaaacaccacaccaaaatagacatatagcagttaataaaacagtttgagaatagacctgatgaatataaatgcttgatataagatgaaagccaagttttccaaggcaagtaggtagggaagaagaccctctacctgttcctctttaataacctaatttccacactcctgtattttagacagaacagctaacagagtagttaacagcatggacattggaacccagatgcctagatccaattaccagctatgccgaagccagcctgacaggctatgtaagctatcatgtcaaaagaaaattttcattaggacccccttcacagaactgtgttaggagtatgagtgtatataccaagttgacttagacctcagtcagtacagtgtacacatcagctcttctgacgtcaagaaaatattctgattatgcggaccacagaaggacatttgggttcttagtgggtttccagtgaagatgagatgggcaagagaattatttctagtaatttaatttgcttctcttcatgctgccttgttttttagggtattgctcccaaactagagttttctacaaggacagccatccgagaatgcatgtgcccgcttagcaacagattttttgtaagtatagttaaagggacaatgacagaaatgacaagagcctcttaccacaatttaaagactcttagtttgaattcagtttgctgagtttaaatgaaactgaacatacagaaacctgggcagtttttgctgggtttgatttctgtgttcaaaccatttgctcagcctgtcccattacagtatgtttgctgtgtcttaggagtggtggtgttcaagtgaacgatggttaactgatggtgtcaaacagcatgggagaccattagccccctgccccaccccccccaccacagaccaaccaatcagaacagctggatgaaggaaaaggagccgtcagtctttgctacagtgtcatagagctgaggtgggatttcagctaagatgatcgtttattcgccaagacagctagtttttaatttttaaaaccattttaagctggtcatggtgacacacatatggaatcttagctctggggatgctgatgtgggagcttgctactgttgaagggcagctgaggctacatggtgagaccctgtctctaaagaacagcaccttccctaaactattagaaatgctctcattgctgtacacatatcagtacttgattactttcagtaaattctttgaagtgaaatggttggacccaattatatatgccatttatgcttctccgtgtctataaaaacctgtgcttggaatatgtctgtgtgtatctgccattttcaaagtttcccctaatacaaataaagctggctgttattacttaaaatatgttaagctaagtggtagattaagtaaacaaatacctttctttgaagttttgttttataaatctgaggcagtcttctgtcatagtttataaatgttcaattaattactggattaattgacagaattatcatcttttttccaatcaaaagaatatttttggctggagtgggccaagtgccttctaagcatggtcaaggcctaacaaaaagaaacagcacagcaaatctctgtctgtttgtttgttttctgctttcaggaagacaactgtaaatcacaaaggcttttatttaaatcacaaagagctcccacaaattacagaaagatgaagccaaaggagaaaagtcccgaccgacttcccaaaggcaactcgtcccgggtacccaccccatcatctcccagacgtctcctcccgcaccagccgacgccagtgaactttggcaaaagcttcgggctccctggagaaagaaagcctccgtttgtggttagacatgtgagcttaaagtgattttttcagggtaacttgttgcatggaggatgtggatagcagtgggagaaagaagctttgagctatgcaagtgggcaacagtaaccaaagagggaattcaaatgaatagtagctgtcattgaatgatgttcattttccagtgtcattgttgggatatgtctatacaggcatcacagagggaatttgctcagtaaatgtcaatcatcccatttctaatttctgaacagtattaatagagtatgacgtctgtagatgagaactcatcattactcagaggagtctgaaactgccagaaattgaagatgttaatcaaaggctgactgataaggtgcatcaactcaagaaaaagttttcactttctcagtgagactggtgttcaacagccaaatgctgagcagggacagggtgtctgcggggaaaaagcagtgatgggcctcactcaaggagccatctgaatcttagtcaccagaggcagtggttagtcactgtagttctcctagttgtcttgaaattttgtttttcttttttcttttctttctttctttctttctttctttctttctttctttctttctttctttcttttttttttcgagacagggtttctctgtggctttggaggctgtcctggaactaggtcttgtagaccaggctggtctcgaactcacagagacccacctgcctctgcctcctgagtgctgggattaaaggtgtgtgccaccaccgctcagcaaaaatttgtttttaattactgtattataaaacagagacattcaaagtaagtttacacattggctcatcagtgtaatataaagaatatctaaagtcagatgtggtgatatgcccttgcaatccagcacttgggagactaagacagggggattaccatgagtttgaggctagcctggattacatagagtgtttcaggaaaagttgagctattgagttacacacacacacacacacacacacacacacacacacacacacacacacacaaccagccacaaatcattaatttgattaacgtcttcagtttttgtattaatagcctttatgttttccatgaagctgtaattatactatagatagatggttggatggacggatggatagatagacagacagacagacagacagacagacagatgcaaactaacatttcctgttactttggactcttcatgaactctaccacacattctagctagtggctatcttcagaatgttagcaatggataaattgctgatattttcactagggtcaccagaaattatgattgtgcatttgatacaggctgtgagatggggcaagtctcagtcaaggtgccatagagatggttgtgtgtagtttacttgtaggtagaattgagctttctggctggaaaattccaattagctaatctgcaaataagaactattcgtagacacagaaatactaaatggctgttttctttttgttggtcttgctaaagacacctggaaaaaatgtagcaacacaacattaaatatggctctgtagaagtgttgatagctagcattttttggacagtgtgatttattctattccatatatatgattataaaatgcagtccttgccactgtggagtaattaatccttttaaaaaatggttagatttcttaggaagtagaaacctattatttaacaagtcattacagtttttgctatatgctaagctcttttatggataatcttacattcttaattagccagattttgtgatcatacatgagacatccttagcagaagcattaaaatttagagaacttgtatctggagaggtggctcattcagtagttaagaacattggctgtttttccagaggactcaggttcagttcccaacacccacacagcagtccctgtttgtaactccagttccaggggatctgatgccatcttctggcctctgtgggcatcagcatacatgtagtacatggacacacatgcaagcaaagcacattaaaaagttttaaattagaagatgtaatcagtatttcttgtcatataatgaaaactaccattgtagcctgctttactgaaaaaaaaaaaacaaataaaatcccaagtctatttcgaaatttatgctgtagaagaatctctttttcaagcccattgacctgcttcttctgcagatcatgctgaccaattttgtcttaggaaacatggcctgccactttaagtaagagaatagttactgctgttgtggggttcgttagtttgtttgatttttgctttttgagacaaggtttctctgtgtagccctagctatcctggaacttggtctatcaaccaggttagccttgaacctcagtcttcctgcctctgccttccaagtgtatgagccaccactgttgggctctattgtgttcaaaaagaatctagatggcagattggaagggaatctgaatggtcagtctcttgttcttggaatactctgtccgtccaaaggattccgagcccggtgtgatggctcacatgtttaatcccagcactcatgaggcagaagctttgtgctgtctttttttttttttttaaatctatcttcagttctctatgttcacatttaacacacaccctcctatctagccccggtggagatggtggatggtttcttctgtggggtataacttactatacttggagactgtgatttaggttgttttccagcttctctctgagttggggtggggcattatgggtaattagaaggcaatccaagctacagcaggtggagtcttacatgtctccttcactttcaggtggacagtgaaaacccctttggtgaaagcaatttggatcatcttttacagaagtccagaagaaaatctaagttctttgactttgatattccagtgagaagaggtacttgagtttcttgttactaatgttccctaaatgagcatgagtgcatcccacttagcatctctcactctggggatagataggttacactgctaactgtgaacccgatatttaaggtctctccagccgaggtgttcccacggggctgaggcatctaagaagctgttcatcttcaagttgccctcagtacttgaaggggactgagctgcgtggtgtgactaaccacatgtggccacagcctgtgggtaggctggcaaagcagatagctgcttctgctggcgtgagctccttgcatcgctgacagttagcaaatacattgtttgttttaccatttttctgaggataaaggagcaagagactgatagcagtcatgacacttgctgacccgattacacgttagtgaggagggagccgattctctgaaacagttaggctaaagtagtcttcagagctatggatttcaggatacatttgcaaataatattgggaactttaaagcgctttgattgacatggatgatggtatccacatttagcatgttagaaattgaaactgcgtaatcataaaaatgtaatataccagcagaaaagtcactagccatcagaatcatattgttatgatgtgctgtggtggctttgttacactgtgggagaatgagagttgagaagaataaatcatgtcttagtataattatgaatgcaggttttgattaggaggtttcatgaaaggtcctaaagggaccccccatgaccattgaggttactgaactgtacgttactaattgacagtgtctggggctaaggcactcctgggaggcttttacctcaggtctgagatgtgtgagtctgtccctagtgaaggtcacggcagctggcctggagttctgagtctagactgggctggcgatgatcccttttgttcccccttggtgggactagacttgtgatggcctcacagtggagtttcctgtgtttggcttagtggtttgtagttttaaaggactagagagtgttttgtggtaactctggccagacagagtgacagttaacagctgacccggacagagggtgaggttgggaggagaaagagcttcatcacctctgacatttaatttaagcactgtgattgaaaatcactggtgcaacccgtaaaatcagtgctatcatccctgtcacagtgaaaacaagcaacagcagtggagcttgatgctggcttgcctctgatggcgcttatacaccgtgcttgccatttcttgatccgggcagtgtgagtacaagtattacaccaagatgttagtggagctacagcctccagatgttcagatctctggacctagatactggaacccctgggactttcaggccatccctatgcttaggtcacttccagatgtataggggaataaaagccaggtctccaagactctgtgtgcctctgagtcagctgggatgcttgttgaactggacaacttgataaagcacgggtgtggggcctgggtccttgtgctgctgggccatggattaccttgagaaacaagggttcaaatcaaagcagatgtaaatgcagttctaacctccctgcaggggagtgcccaaggagttcctaggcttctgaatggttttgtagctatcgctaccagggacttagcattgatgattccttgtccagtttataggggcgggccatggaggtgttccaggaccacacacacacacacacacacagatgagtatgcccagatagggaaggtgtcaggctttaaaaatctctccttttcttattgcaactggtggtgtaaggggacgaagagtctggagaatgttttgtcattaaacttggaaaaaaaatccacttgcatttcagttttctccatgtgtatttattacttttagagtcaaagattttgttttattttggaattagaccttgatcatattaggctattactttgctttctagtcatccttgctactcactactgtgagagctacttgcctctcgtggacatttagggtaatgacaataatttgtggtttgtatgcatcacgtttctctatgtttttatgtattcttatgtatttttgtggctcagtgtcaaatttcgtgtttacctcagacaagtatactcaagagctaaggacttatgcagcagagcatagcaactttatattagatccatattgtcttctttgaatctctgggcatctgggcaaaagtgttttctctctttaaggctgtaagggtcttgaacttctgctccatagcatgttggtcccccccataccctttctagctgcgctataactgaaaatgtaacctgactgtggaccccaggaagacagaaagctccctagaatttcagtgccctaagagagactcggttgtgatcttggattttacaagggagcatttagttcctttgtcattcatttattgtctaaaatctttgttcttctatgtgatgaatgtatcagcagttttatggctaactggtaacaagttcctcacactcatgttcttctttcttctagcatcttctcttgaaagccttgcaacaaacatcaaggtaatgatttatttccagcatctatgtcaagccctgtgcagtcagtgggagaatatgttcccagctgtgctgctcattttagagaagcatagcttaagtcgggtttatgcagaccagtgctccgaatccactgtctgctacattgtgaagttattgaattgttccttttttttttcatctgtgtgatcaatcatcaaggaaggttttatacattgcctgtctttaatcagataccttttatacaaggaggtggtaatcgtgtcctcaagtttgatcaattggccaaccgaaagctccagcttgtatgctacaaactgagagatgcatatgaaggagtttactttggctcattaatgttgccaaacacagagctctcagctgtatccccctggctcatattcctgaggcttttgcaccacagccccatcttttatttgtgggagatccctgaccacatattctgttatcttatctcagtttctcttccttgttcaaaaccaaaactacaagtgaagaataatgcatgttgttactcaggttaccagagagccagatgaacgtattcttttaaggaatcagccaccatcacctttagattcaaggatgtccgaaaaacccattcccagtcaccaaggggatgccgatttccacctggaaactccattttccaacaccccccggcattccagatctcccagccctctggataagcctcctcttcaagaaaggtcagaagctagtacccatcctcttgcctggtgagtcttgtgctctgtcaggaagaaagcttgtatgccttgacagtttgttttgctggaatattcagttggtgcatatgactatcttttgtaaaacctgcacaaaacatacagttagcttcttctcttcccatgggaaagtgtttgagggtacctggtgtaggtttagcagtgtaactcaatggtatagcacctgtctagcacgtatgaggcctgaggttcaatctccagtactgccaaaaagaaaaaccaaagcaaaccatacacaacagaaaaacaggtggaggagatgatccatggaataagagcgcacacttgcagcacaagcgtgaggatctgagttcagaatcccagcacccacgtaggaaagccccgtgtggcccctgatggaggtgaactgggtagggttgggttgaagacagagattgagttttaggttcagtgagcaaacttgtcccaagggaaaaaggcagagagtgagtggcaggggcacccagcatctttcttcctttgctgcatacacatacatacacatgtatgaatgcacacacatgtgtatacatacccattattttctatcataaattttaaaactgaagttttcatttttacactataaagaggttccgtagacattttagaagctacacaccaccgaaaagagttgggggaaaatctcttatgtcccaccaatcaacaacaaacaccattaatgtgcatatatctatatctcatttgcatagacatagtctcttggtttgtttacattactgcaagtagtgaaaaacatttgcataagactctgtccgaagaggtgaagcaggggtctatatttgccagtcagcatctcaaataatatgaatagccatttggttctcttaagtctgccagggttagccaaagccatgtgttttagggaactaaaacaaatcagcagacaaatcagcagaaggggctggttatctttactcaatggaaaggccactggaaacaaaaatcagaaagcagctttgaaagaaagacatgcctgtcagcttttctctacattgttagtgatgagagttagacaggcccttccctagaaaacacaattgctgcgcacacacagggacccactttaagcagtcccagaatctaaacatccctggagattttacaggaattatacttgagtttgaggtagtataagaaagtagcaatacatcttttagtgtttttcacaaatgaaagaacaactgtattaaaatgttacactctctggggaaattacataacatatagtaataagatagcaatgtaatgccaattcttgattattcactgtactgaaaaatggtataatatttaaagacatcaggttctctggggcagatgttcagcatcatagttattcctgccttgtctccttcccttctggattgtgcttctcccaggctggcaatgagagcattattcagtgttcagagacctagagcctgggaactggtgatgagctagaggtgtgggcactagtgacacttgtctaagtgatatgcgatctcagcagcattcttgttccatcatgaagatgactgagatgaccaaaggcccatctgcttttagctacagtgcttttctgctgcaggaactggggtagcccaaggcttttgagtgctttgtttagagataccttcctagctcttagaattagtacagcaggctttcctgaccctaaagtacatatgaaattctcagacagctattcgtaatgtacctgatcacggcacatctctactttccaggggctcatagactagacaagaaggttcacatgaccccatcctgtggtgatatgctgtttatggtctaataaagccacagaagatcagaatgaaaagctagccacagccatagaagccaggtggtggtggcacatgtctttaatctcaggactcaggagacagaggcagatggatctctgtgagttcaaggccacccagggctacatgagaatgaatcagtctaaaaaagaaacagagctcactcctttaattccagcctagagaggaatatgctgggctcacttgacagttagtctccagtcatgttgaggtcaggatctcctcagccttggtagaggtaagaactctctggtggcttagctgctttgcttttctgatcttcagcttgaaccccaatatgtgtctctggatttttatgattcatgttacaccatcctgcttaacatgacatagatcatgagatgccctcaacagtagtccaaatgctgggggaagacagaacaggaagaagctaattcctgcaggaggcagggcagagggagggccctgctgcttctcaacatgtcagatggcatatgcatttatgtattcattcagctcccctttgatgcatgttttcatgaaattggctagttgattctcacttttggctgatgaaagaattgtctcgtgttgacagagtcaaacagaatccattgggattggagttgagtgtgtgagagagtgttaagattgataatctgtttaccaagcctggaatggagacttaacatgttacacatttctcctgttttctgataatttgcaacatagcacagaatggaaaaacacatgcatactcatgcacgcatacacacatacacacacacacacacacacacacacacacacacttctataaggcagaacttataggttgggtgcttttagagaataaatgaggagaatggcttttacagtggtagaggaggtaacatttcatgtgggccctgaagaaagttggttcatgactgagttaatggtaagaagggatgggaggagagaagacaggggcattgtttgctcccatcagtaagattaatttggggaactattcagtctcagggctccagaatctgaggatagctgtggaagagcagtggagactgaaaaggcaagagagctctagaatgttcagtcagtggaggcagggcaaggaacagaaggaagatgagagggcattcagccatctcagatgaggcagcaaactcagcatgccagtcattctaaacagtgactttggacctaactggactgtggggtgtgtaaataaggccatgatccacaatgacaaagaactgtgacagaaaggccatccagttggcctatggctatcctggctttggttcccaagtctcacactgtgggaaagccccgagacctggattagccaagttagttggccacctttcttctagaggagtggccttacataccatcttttaaagaatgctctttttgccaggcagtggtggtgaacaccttttaccctagcactcaggagacagaagcagcagatctctgagtttgagtccagcctgatctacagggtaagtttcaggacagccaggcctacacaaagaaatcctgtcttggaaaagaaaaaaccaaaagaaagaaaagaaagctgttttcaaaggacaatgtatgctggcaggaatgtagggagaaggaggcctccattcactcataatggcgatagaaattgatgcagccactgtgggaatagtgtggaagtttataataataataataataataataataataataataataataataatatgataattaatagctatgcctttcagatgcttcagggaaactctgatgctcccttgacaagtttaggtgataaccaaggcagatgtctggaaccttcgtggctatagcacctttttctttcctctctgactgccctttcacagggccaacaggaccagcccctcccggtggtgcatgggaaacatctcttgagactctgttagcttcaccctggaggcagtcaatgctcagcttgcagggatgagggatcccaagataacatagaaagtaatggatcttattatgacacttcatatatattctgttcttttcatatcagactttcacccctcccccactccttgctggttcccttccttaccctgcaatggcctccctgctcccagcatctaccccctcaaagtctcttcttgtacgacttccgtcctagttagtgttatcattgctgtgatgaaacaccatggggaggaaagggcttatttggcttacatttctacatcactgtttatcagtgaaggaactcaagcagggcaggaacctggaggcaggagctgatgcagagaggtcatggaggagtgctgcttcctggcttattcatcctgcttttttataaaacccaggaccagcagcccaaggatgacaccacccacaatgggctgggccctcccctaccaaacattagttaagaaaacgatttccagatgcacctgcagcctgatattatggaggcattttaattgaaattccctcctctccgatggctatagcttatgccaagttgacatcaaaccattcagcgtagttccctttctggttttatgatttacatgagagaaaacatatagtatttgtcttgtgaatttggctttgtttgcctggcataatgatttccagttccatccattttccttcggatgtcagcatttggcagaataagatcccattgtgaatattatcaccttttccttccctattcatctattgatgggcatgtaggctggttccatttcctagctgttgcgaacaccacagcagtgagcatggatgtgcagacatctttgtgttatgtagccttagaaaactccagatacgtgcccaggagtgggatagctggatcatatggtagctgtactctcttgtttttcagaaactttgccctgatttccacagtggctgcatcagtttactcccactctcagtaaatgaagagtcctctttcctcgagtcctcgccagcatatgtattgtgaaatggtaggatggactctcaaagcagttttatttgcatttccctgatagctaaggaagggtattgaacattttaaaaattattttattattaaagaaatattaaacatttgtgtttctttgagaactatattcagttttccagcccatttactaatcacaggctttgttttttgggttttttttttttctgttctttttgtatcctagatgctaatcacctgtttgatgtattgttggcaaaattttctcccattctgtagtcagcccaatattttaagacgttaattaatgttttacattttaatgtaattcatcactttctcctttccctttctgccctccaaccccttatgtgtccacctcactctcaagttggtagcctctttttcttttttattgttacacacacacatataaatatatagatataacctgatgagtgaatgtttattatatatatgtacacacacacacacacacacacacacacacacacacacacacacgcacacacaatttcagggatgactactttgtattgaagacccagtcatgggggttcaaccctgggggagatgacttctccctttctcagcagttgtcaattgcctatagttctttgtttaagggtagggcactgtgagattttttaccactttcatgttagcatgtttattgatagtttccattgtttagatcctattaacagaacaattcctaggagaggcagccacacaatagactttctcacagtctggctctttcaagttttctactctcttcagaaatgttccctgagacataaatatagtatccactggagctggactacccatgacccattgatcttttcactgagcccagttgtggttttctgcaatggtgtctatttgctgtagagagaaccctcttcggtgtgatagctagacttgtatgtggttataaggttaacatttctaatgcagttaaagaattatgctggtctagcaaagagacaatggtagattctcttctaagatttatgacctcattagccccaggtagttgactagggttccagtactaggcatgatttctctcctgtggagtagacaattagacagctgttggttgctaccaacatgtgagcgccattaatgcacttttatagatatcttactatgttggtcattgttgtggttcataggtgttataactggatagcatgagtaattgcttccctcctttggcagcttgcatagtattttatgatgctatgtaaactacactgcagggaggatgctttcagattagatccagttcaaataatccaagtcctgtgtccttaagtgttcaaagtcttcagcaataggtcttacttaacattatcctctgagaggcatctcagggcaacatcagaagcctatattatttggggagtcatttggactaccttgactcaaaaggtggtttctcatgcctattactgttagtatattgttcttgtagggagcattgtgagcccaagtgacacaacttcatttacacacacacccacacccacacccacccacacccccccacacacacttacataaattgtgggttttaggtaaatataaagtaatgtgatttctcgaggctgtaccagacaacctcgatgttgtgtatcttccctccttcccacttttctcttttccccttgtatcttattcttctctcagttccccctgcctcccacagtacattgtcgtttgctggtttctgtggttactcatgttgtgtatctactcacatctggagatttgggaccaggagcctctgataagagagaacatgtgacatttgtttttctgggtccaggttacctcattcagtataatcttttctagttccatccacttacctgaaaatgtcacgatttcattgttgtttataactgactagtattccatagtgtatgtgtagtacgctgcccctatccatccatccatccgttaaaggatatgcaggtttctctcatttcctagctattgcaaagagggtggaaataaacattggtgagtgagtgtctgtggagtaggttgccgagtcctttgagcctatgcccgggaatggtattgctgggtcatacggcagacttaattttaggctttcgccaaagattttaatggaaaatgtacaaaaccttttgaataccagagtgaagaatgtagtcccaaaggaaagagggacagcccccacccaagatctcccccatccacagcatgttgcctgcctcaccatacaatctcactcttctcgtatttgaggagaagagaatcccagcgaatgctgggatgagacaactctatagtatagtatctgtactatagtatctgatgtgtccagctggtggctatttttaaagtcttttaaagaaatgcttgctgtatttctcgtaagattcttaaggagagcagaaattatgtatatcatgttttctgaaacacagcagtgcattgagggttcagacgtttgctgcccattgtttctctgagttggtaatagatgggtggactcagccctactctgggccttatgtccttgctccagagaagggtgtgatgggagatcaatgggcacaaactacagacaggaggagccatagggtcattggaatagtggccctaacaaccactccagacttccatagtcggctaaagatcagtttctatatattcttgatggcaatccttgtcaacatctcaaatagtgtttctcacatattaacagaatgattttacccaaattgctaaaattctttgaatattttaaagaaacaacatctgcactttacatcatcaaatttctgtgtacacctttagtttagcaatatctcagagtttcggacttggtactcaccacagtatgaacacattcactactcaaacagtattgtttttgaaagctttattttgtgggcctgagtgtgtatctgtgcatcatgtgtgtgcatgttcccatggggaccagaaggggatgtcctggcactggagttgaaggtggttgtggggcagaggatgtgagtgttggaactgaacctgggtcctcagtaggagcaacaaatactctgaactaccaagtcgccctccagtgcctcaaacaatactctttaaaccacactgtggtattcaatacctactgtgatctgaggtgagttctacttttggccttttgtgacagggttctgctgtatagcccaggctaccctcaaactcatgatccttccacctcagtgtcctcggggctaggattacaggcatgtgacaccacactaagtctgggatgaaatattaaaccaagtctccgcctgggtctcagtctagggaacacattaaccagacggggctgggggggggacagtgtccagtgtccactgtcagaagccttgtgaactgaacaacatatggatcagctggcctctgcggggtggggcaggtctcctgagaaatcagcaatggaaccggttgtggtggtgcacaccagtgggatttgctggagaaatcagcaatggagttcatcccaggggagtggttgggagttaatgaaagcagggactcgggtgggaaggctgcagattttctgcacagaggggtctgtggaagagagaaagcgcagtgtgtgggaagctagaagacatcatccagcttgtgcttcagtttgggctccgagtggcttaaactgaagtaaagcctttatggcagaaaacaattgagattaagattttcaaatataatttggggttgaaaatcaggatttttttcattagcgaatttcctgaaacccagcagagtccaaagaagaactgctcataggcagacaccaagcacagcacgttttaaccatgttggtggtttgtatccccacgatcctcacatgtaggtttgatgccagcattaaaatcataggtgtaccatttttgcatactgacattttagcttacggttaagtttcaactcatatttaagtgctctaagttagcatcctttttagtagctgcataatgctccactccatttactctgttgggcaggttccagcctcattctcagtctacgtgggagaagatccatgagagtgtatgcagcctcctgacatcccacagagcccacccaaaggttaggggttctgtcgaaactagatccttgctggtaaatgtaggaactggagttcgaagtccagtgagggaagcagacatcagtgaagtaaccatagaaaccacgtgaaactgtgacactgacccaggagagaacatgttgtcctgagcctgacctggcaggtatctgcatggttgggagtcagggcaggcttccagaggaagggacccagaggagattaatgtgagcagttggttcggcacagcagtcatcaggcagagcggtcctgggagtgctccaacgaaccacccgtgctctctctctctctgttcacagtggtcccaacacagagaagaacacatttatgtgagggcccatgtagggccacatctggaagaaatggcatcgatatttaattaggtgttttggtgcttgttgttttctgtagtcttagggggatttctgacctaaggcagacagatatgcccagcacttgatgtttcctgcagaaataaggcttgcaggtcttgacctgaatttaaaggcattccagtggagcatcaaaagggcccagagtctctggagctgatcgtgccacacagcttatactaggctggcaggatgacatttgttaagtgggtattggtcatggtacccatgggagtagtcagtttctttcttcctctctgaagagctttgacttagtcttatttcctaacctaaaggtaacaaatccccttaagatggagagtaggaagcgtgtgcgcgcgcacacacacacacacacacacacacacacacacacacacgagaccccatttgtatggcacataggggatacacaaacctcttcacactgaaagccacctgtctgggtattaccaacctttattgcatcccggataatgtaattgctggatgtgttttattataggaagattttatccctgagacaaattatatctgttcaagaccaagctgcccaatgaagacattcccacagcatggacagagatatttttaactactatctcatgtaagtcagcagcttaagtacagctcgttattgtggtttgctaaaaacagtttctgcctgtctcctgctgtcactgaaattcctaggaaatgtggaggaggtggtgaggagctctgagaactcccaacccccccaatccagcccatctcagtggaacaggatagcagggacctgccagttgtcacatttccgtgtcccacaccccctccctctttatgtagaggattcttttcagctcctgtcctgctttgggtcctctacatgccacctggagtactatttcctgactcaaacagagaaccttccattcatctgtgagtctccattgcctcgccctgttcttctaacacaaagcctttagcatttctttccaaagcagaaacaatgtattattactgtttaaaatcagtcttttatagtagaaggaaatggaaagtcagcatttgctcagtacaaggaaaccaaatcacacacactgggcagggatcctgagcaagggcccctgctctcacactcatcctttgttcttacatcttttgacccccccagagtagttgttagcaagtatagttctatgtgaatgctgatatgtgataaggtacttgtccatagggtggtgggtcatcatttcttaggtattcccgtagttttcctccttaaccaatgctacaattaacaattgttttcttcaaaagtgacatgtttgcttgtagatggttgcaagttggatttctgggggtgggggtgaggctggggaacttggtttctgctatcatactgacttttcactcttctttatgtatttcctacatagggtcaagaactggccatgagctaaattaatgtttaatttttacagccctacgagaagggtgtttctactaagttctgtttttgaaggtagggagactgaggtacagagagccagatacctgctcaaagtgacatggctagttagtcagtggcagggccaagagtatgattgataggactctatgatactgaattgctgtattctgttgcctttccaaagctagagtatgaccaaagaatgatgaggagtaggtgcatgtgtaaatggcagccctttggtaccctgatgggagggggctgcctttgaaggtttcccctaggagtaatcgtgttatgtcttctagccatcagaagggagcaggcctttttacgcaatgaaggagagtgggatgacatgctagatttcccctgtcaggctcaagggtcatttatacttcaccctggcccagagtgcgggggtggcagggagctggcagggctctctgccttcagcatgaaagaaggaggatatcttgataattgcctattctgtgggcttttctttagaacgttctgcttggtagattaaagggtagattctaggtaacttaatctctccttgcaagagtctctacgcgttcattaggctattacacggaacatagcacacgtagtcaccaaatggcaaattacactgagtttctatgtgggtaaagtcaagtttcataaagctgatttctagacactgatgtgagggggctaggaaggaagtaaaatagactcccacccccattgccaattcagtcttagaaaatgggtttctttcatatcatgagtccccacgtaaggtctggaagacgtacataggcctttcccagaagtgccctttcttcctttgattaatgttacgttttgagtcctggatccctagtatgtcaaggatcccaaaggatggaactagggaggggtctccgggttgaaagaaacaaatccaaagaagactagtcaactctgaaggtaactgggcatttcttaggagtgacccagtagacttggggagaagcaaggtcaaggacatgtgagaggagagctggagctaaccctgtggttggggaaatcacccagagtgggtgaattccagagtgggcgactccttgttacacatcagagccccttcggtttctgctatgtgtctctgctctgccttccctaggtctccattgacagatcccaatctctggtaacacccccccccccccccgacagcaggccttcacagtgctcagctttccctgtcctggctcccttgtggtctcagcctccaagaaaaattaaaaagatccttagtcacctaaatactaagaaaatttgaacccaaacatggagtcccattgtctgtcttggtagacatggaatggaaaggaggtgggtagaggcatcaatgtattttattccgatgtgtcaggacatgggacttggggcataggtggattatctataggtggatttaaaaatgagaaaattccctaccaaataaacacagccccccccccatgaacaaacaggaaaatcccatgacccctccaaactccacaggtaccccaagttctcttgaagagatgattattcctatgatctggcccttagtgagctgatgcccaagtctagtgtcatgactgtgggggtgggatccaaaggttttctctgatggtctcagtcccactgagtgagagcagtgtcaggccctcattttctttgcattgggggtggagtgtgggtgcttactacatgcaccagctctggcccactgaatgcttacagtctccccatctgcttctagattttatctggagctaacccttagtgggagggagcaggtggtagcctcaccgtcatgcttctaagtagatggtaatcaaggaactcaagtcagaaattcctcagacagggaaaattgtagcctcctgccttttggaaaactcaagaacaacaacgagaaagtatgacaagaaaagagaaaggttaaattgatggtttaaagtgctgttttccgatcctggtgtcacctgtagccccagctcatgagacagttgtggccataggttttaatgtcacctgtcctagaggatctgttacatctgttaccaccacagcccaaagcaaagcaaccctatacgacagagcccaacttccttcagtcagtgttttccatatagatttgggcaccagcatccaagggacttgtcatttggtgacttgtaggtgactgatctgccttcatcctggaaaaagcccctgtcagcatccaacagatcacacaggtgtaagcaaattcccagacctacagtctcaaagatctgtatgatcacctggggggctctgaaaacatagagcccatgctctgttccaaaccactttaaccccagtggtgcccagtgcctggaatgctataggaagttgcttgttaggaaattatatgccctttaagactgagatgtgtacagtagacttgagttttgtgggaatgggaaattcagaagacccacacatcacctaattccaaacttgacacccttgcatgctcaacaattgctctacagaacagcagattggaacgtgcttaaccctcccattcaatgacatccagtaggtttgggcacatttgccatgaaccaaggacttcagtaactgcacacatagtactgggaggtagatgctctgactgtcattgcatgctattatataaagaggtcaaatgctttgttgtattctgaaccaggtatgtaggggcaggggcccagagaacaggcaattgggagactgagctgggtctaagggtaggatagttcatgttcctctccttggctgtgtctattattcacctttttctcaataccacatgtagatatgatcttcaaatttcacagggaacattcatgaaaactgaagaaggatgaagggctcagtcatcaagacactgacacatccctggagaaacgaacagcattctttgttgtccgggttgagttacttgtgcctagccccccccccattaaatcaaaccttatactcagtcttttgtgcccaaggtaagaattgttgattaaattcagtttggggctctcattcacacttgtcatctggagaatttgtgtttgagcgtgaaaactgggaaacatagtagaagtatatcaggggcttttccgtttggaaagcatttttaaaaattgtaatgaaaatatgttgtgggatatttgtacactgtgtgtagatatattactgtgattggttcaataaagagttgtcgggtcagtaggtaggcaggaggtataggcaggacttctggcagagtggaaggaggaggagataatcaaggctcagggagacgccaatgaaacatggagggagtccggcagacagaatgaaaggtaaaaagccacatggtaaaacatagattaacagaaatgggttaatttaagttataagagctagttaggaaccagtctaagctataggctgagctttcataattaacatcgtacttgtgtcattatttgggagatggctggtgggacagagagactcattacaaaaatatattaagccgggcgttggtggcgcacgcctttaatcccagcacttgggaggcagaagcaggcagatctctgtgagttcgagaccagcctggtctacaagagctagttccaggacagtctccaaagccacagagaaaccctgtcttgaaacaagtgtaacaaaactgtcttccatgagccagagagttgattatttagggaaataatgataaataaaccaactgggaaaagatcagcaacctgattgtctcgttttgataaatctgatttttgtgtttcatttttttgttgttgttgttattgttgttgttttaggcttggatgacatcaagtcccttcaagcccaggaaaagagtataaatacctgaagagttcaggtctcattttaaataagcttaactttctaagatgaattttcgagaggtgctaatttctgcagttttaaccatcccctcttcctattgcccctcccaacaattcttaataatatagatcagaaacaagatgttctgcaagcatttttctgagagaactgctttgagtaaatagatgccacagagagtgccaccgagctagacttcaagttcatctgtaggagtggttacgaaatgcttaggcattctgggggaaccggaagaggaagatctggaagggggctggaggcatgcggccttccttccaccctcttagaacctcgtttgcttcagtctgaatgcttgtgtctccttgaaatcctaactcgaaaggtgataccattaggaaatggagctttaggggaagccagtgagtcacaaggatagagtcccatggatgaggtgtaaaatcttctgtgggaactctgcccctcctaacacatgaggacacacacagtgcggtgaaccaagaaaagacctttaccagatttcaaatttgctagctccttgaccttggacatcctgactgataggactatgagaaacaagtatcttttctttataagctacctaatttatggcatgtggtctttctaccccaaacgaataaacacagtacaccaaacaccttttagtttttataagacacatgagaaccaggttttgtttgtttgtttttgttttaatgcctaagtaatgggttttcaaagataaatcaggagtaaaaaatattaaaacaaaacaaaaaaagatagtctggaaacaaaataaaacaaaactaagagttctttcagaatttcagccaaataaaggtgtattccacctttggaagcctcagttatgtgtcctttgaaatgttcgaggtgtctctgaaacagtccgtttgctattttgatgtgaattttaaatagttgttaaaaataaaagctactaaaattaaacctgtgtcatgataaggtttcagtatagttcttagaagagggttgcctgcatgagcaactgaggcaagtcagccctaatgaatttgcatttaatttcagttgttaaaatataagttgagacattcagtattgagtttcaaaaacaaaaaaacccttatttttcctattgtttatgtatatgtggttgtgtgcacatgagtgcaggtgcctgcagatgtcacaggtgtcagatccccctggaggtggagttactggcagttgtgagctgctaaacaagggtgctaggaattgaacttggatcctttgcaaaagcatcaggtgctcttaactgctcagacctctggtgttccttttggggggcaggcaagtggggcttcagcatgactttttaatttattaagagtataaatgctcgtttctatatgaaaccctccctccccccttttttttctcaattatgcccctttcaagtttctctgacctgatcattttattgtttaaattattttaactttttatttttcaaggaactacttaagctttgaggatccttacagaagcaaggactgaagttcaggagtcttgcttttggagtctaggatagcatagatcattttgtgatgggagtttggcttgctatggggagagctgtatcactgtggtgatttgaataagaatggcccccgtaggctcatatttttgaatgcttagtcaccagggcatgacactatttgaaaggattaggaggattaagaggtgtgaccttgttggagtgtgtcagtgggaatgggttttgagattttaaaggcccatgccaagcccagtctctctctctctctctgcctgtgaatcaggttgtagctctcaacctctgctccagctcatgatgataatgaactaaacctctgaaattgtaagcaagcccatatgtatgtatatatatatatatatatatatatatatatatatatatatttgctttggtcatggtgtctcttcacagcaataaaagagaacattaaacataatgaaacagaattcctacctgtcatgttttggtttataatccctttcttgactttcacagttgcagatctggcaaatccaggactatattttacaaatacatttcacagtgtttgggtttgcataagctcctgggacagcatcccttgttgtgttgaacctgggccttctaagaatagcctctacacagcaacaccatttctctttgctcaccagactggataaatcctgtaggctttgaattataacagagatataaaggagaacatgaagaataatatctgacctaaaatggttttaggtgctaacttgagaagcttgaggagttacctgtgggaagtcaggttagtccctggatgttgggaccctgctcaatgtctccatacccaacccaggctcctttaagggacttgctgcggttcaaacagggcatgccttcagtccgtgctgtgacccacaaatctgctagcactgccaggtgggatcgttcttcttgattaggggacccattccagcacttgtcggttttcagttcttgtagggaccttctctcctttctcttgtccttctgacaatgagactatgatttttgctcccttggtctgggactcttcctccctccacactgggtctggagctcccagttataatggtgaagttactttaccagagggaagaacctatgcttggttttgccttcagaaatagagaatggggtccaaatgagtttacatgtgtgccaaatgggtcctttttagaatagacaccttgacagagcctcttcacagagttctagtcccaggtatttccaccctgtgattctgatattttagaatgctccaccaatatctctctaagtccattctgtttccagttacggggactgaacacagggccttgctcatcagaggcaagtacattgccacgtctcctgctgttagttgtttgaagcagactctccctgttcatgtaggatggtcagaacttatgacccttctgcctcagccttccaagcactttattccaggtataatatcctacctgattttcttatctttgtgtgtgatatgtatgatatggtgcacacatgtgaatgtgacattctactcacaaaagagtgctcacccacaagccagagcaggacatcacatgtcttcctccacggctttctaccttattgtcttagacagtgtctctcattgaacccaaagcatatcattttgatgggtgtgtaggatttgaactcagttactcatgctggcaaataagcattattacccaccgaggcatctaattgggaaaaaaaagaagaaataaaaaaaggaaggacatgattgttcttaggtatggtggaaaagaaagtttattgtagggaggggagaggagagagccagacctcaggaaggaaaagagtagaccaaaaggaccaagtaaccaaaatggctgggttatatagggagggcagctggggaaagagtagcccaactcctgggctggagtttaggatagggggtgggctatgccagtcaaaccctgtaacatgcgggaactgagggatgctgggagaacctggtggccaggtccacattgatatgataaatagacatctcagctgtttgtacctaatgccatttccctatcccttatctttatttttaaaatgccctgcagctaataatcaaatatctacacacaagaatcccctactggggcacagtcacagtctgtagcttttgccttctccttaaggctgtacagtcataagacagcacaacatacgtggtgccaggtttgctttacatgactgaggacttgtgtgtgtgtcctctcatcatcttgaccataccaagaactccaaaatcacagcactgagggtttcccatggatgccccagaagtagtgatcaggattctggagcttgttggccccaagacacacctaggttaggactttcaaacaaagaaaaggcaggctgaagctatggctcagtggcagagaacctgcctaacaagctcaagttctatagcccagacctgcacttgaaagggaagggaaacctctggcaatgtagggagtttgctctaaggtgagagagttgaaatataatctgtagggcagataggtgggcttttgattgtgattggttgggaatatttttgaacccggcaggatgtgtcattgtatgtcctgagtagcttgggttgatatggggggtaatttgtcttactttcttccacaggaaagggttaggaaaaggacaactttggggtgatttagagagtcgctttttttttagaggcctcgttatctgtcttgggattcttgtgggtgggtgggacctgaaatgccacaaacatagacgcacatgctttcttctgttttgtatactccttatctgctctcatccactagtccccttacttggcatctcttgccatgtgctgtgtccaacacttttttacgagcatatcaactgaggtgtgaagattgagcccctggatttagagccattgaaggtgagggccttggacagatactataccctcataattcctcagtgtccttagatttgaaatggaggctatgatactatctgcctcaggatgctgaaatgcgatgactcatttaaaaagtatgttaaatcagtgcccagcacaatagcagaacccatcaagtagtagccattattatttccatctcttataatcatttaaggaaaacatcatttcctcccattttcttgctaaggacatcaaggctcagaaaaccaaatgtcagagccggttttcaaactttgatctgtcttgtttccaaaccagatggcttatctgttgttttctattacttcttgcttggttgtcacatgagccttattgaccccaaggctaggattcctagaaattgcttgaaaaaactaactcatcatttgtctcagagtgacagggtaactcaggtctcctgagagtcttgagaatgaggttagccacctcttgtgtcaacaagaggtgctttctgtcatttcctgtccttaaaaatgttgtgtttgtaaatagcatttttaggaagttcttcttcccccctcccttcaaaataagcctccctgttccttttccttcaggaactgacacttaagatcagtgttctgaactgagataaatatcacacctgttttagtgggatgacttccagggacagaatgtaagaggtaggtgctattggtggaagtgcttgactcatggcggaagttcatgtaagaccatccggctctgcgtaaaggaagctcaacccaggcatatgatggcatcctttgtgcactgggtcatgctgtgtcccagtgctgacagctcacccccttccacagccttggggggatacaccacttttcactaactatgtgcaattaggttcctgctctgtgctcggtagagaacctaaccctgtgggaagggagaggtcacattatgatgtctcctaataaagttgctatccttactagggaacgagatgttctaagtgtggttctcagaaagtattgtaagctaagactcagtggatggatttgtgactgtcaaccacagggggtttgaaataatggtggctcggaactgagatggaccgtgtaacaccccctccagtctcccatgagctgttcagattctctaaatacaattctgaagcaacagaagacgccatggcactgcttagtcatacaaaataatgatattgattgaagtgaggcttgtagaagtcaatgtcattaattttttagccaggtctcgaattaacttaataaaacaaggcaatatctgatcatgtgacaaaatattgttattagtttgtgttccaggaggtaagaaacactggacaaatcagaaagagattgggagaagacatttggagaggacaatggcctgtgtaaggaggaggaattgtcccctggtgacatcttctagtgtcttagatattagccctcaaggctctagactttgtgtcatgggcactcaggcttaagggggagaaagtcaagtgctttctgatgagcttgcttggggtttggaagtgactggcgaagtttggaggtgggaaatcaagaggcaacttatcttagtggtgtttcaaagtggatgggcgtgtgatggggaccagggtctgggtcctcccaggaatcagtggggctggtagccttggatgagctgtaaagtaagcatgaaggatgtaataggagttgtacattggccaaaagaataattgtcttgtagacagatctcaggacgtgggcgccttctttttctaactgtgttctttgtgagatgtgacatgagataaactcaacaacaaggaggtcaagtagtctttttttttagcaggggagctagagtaggaaacactcagagcacttggagtgggctatgaagcggcagaacgggcccccacatgcaccggaggcctgaccctttttttgtttttttaaatctttttcaatctccttctcattatgaaagtttcatggttgtaaataggatttagaggattttcatgttctactattcttgtcgaaagggcagaatcttgggcagcaacgtcaggatcaacatggtccactcaggggtttcctattgaagcccacagcaatgggactcaaatgattgcactaacctctctaaatgcgtacaactcagctctgttggattcacaggcaggaagaaccatcatcaccctaagatgagggggaaatggttgtgttctgggaatactctcagttctcgagagacttctggaaaaggttctgaggttggtgtggaataagttaagttcaaaagccctgtacaggctggaaatgggatctgaagtttggctgtgcagctagggcaggcaatggccacttacatcgtgtagccatatagttttggtaatagtccatggagagtgatagtggtaaaggccagctttctggtggaatggcacagagagaccagaatgatacagagcttgttcccttatccctcagcatccaaggtccctgtgcacttggcggaagccaagatcataagaagcaggaggagggcatcttaagaaggtgccaggaaatgtggaggtgagagacagcagccagatggacatagactaatcaaaggtgatggggactgcagaagagcaaaggctgtgcctggggaagtacctgtttggattttgctaacagggcactggttaccttggaggtttaggagagctgtgtgggtggaagacaggggaccaagactttaaccagggggaggaaataaaggcaaactgatgaacagtttagaaagtgtggaagaaaagggaaagaggaactgggctccagtttctggtatctgcctgcctgcctctgattttgtaacagatagcccttctggaaaatttgtgatttgattgaaggactaaatggaatttgggtggagggatatgttattggtgttatcaaaacagccataatgagaggaggccgagccattaggtgaaaggagggtcatagatacattaacgacccatagccagaatgggaaaatggggatggagaatttgaataaggaaatttggttggagcaaattaaatgacattagaaagcacaaacaactttgaaagcagaaactggatactatcctacacccctgctttggctttgcagcaatttgaagccctgtaactggatagccaggaaagaacttggaatcacatatatgccctagctgggtgaccttgggcaagtaccttggtaggtcagctttctcgtctggaaaacagggcaataggaatgttaaaaagaacaaataagattgtacatgtaaaatacttagctccacaccagcacatggtcaatgtaagattttattaatgtatttaaattgctttattgaggcatgattgccaagcaaaaaagctatttaatgtgtgtaactttatatagccttctgtacagggtcatccctgtcaccacctccaaagcaagccttcctccctcccttattccttccctccctccttctttcccttcctccttctatgctaaaaaccctcttagcaaaattgtaagtattgcaacacaatacttttaattagtcattatgctgtaaagcagatctctacaatgattctaaaatgtcttaaaatgtttgggtcacctgagacttgaattaaagtgaatcacccgcccccacctctgttccttatatgaccttgggaaagtgccttaaccttttgtccactttttttttttttgagggggcaaaattactggggagaatcactaaggtaagagagtattggagttgtgtgcctacctgtaacgagtcttttttctatcccgccagccatcttccaaataacaacacagagaccttattatgaaagcccagcctatagcttaggcttgtcccactcttataactcaaattaaagcatttatattaatctacattccgtcgcatggcattaccgctcttccatcttgtacctcctgtttcctctccatgtctcctgtgtgcctagatcatgtcctcctatttcctctctctaccaggaagtcctgcctataccacttacctagctattagctgttcagctctttattaaatgaatcacagccatatatcttcacacagtgtgcaaatatcccacaacacctaccagttgtgtgtctcctgtggtttctttctgagcattactaattgcagagtatctgtgctgatgtacagcatcagtgctcagccaaggctgtgcaggaccctgaccccttccctcctgccacagagggaaggttcttaatcacctgcaaagctaccagtgcttctgctctcttctcctgatcagcaggtcacattatttcccatggtgacttaagtacagaggtgggtttttaataacccagagagcttacaaaagattaaagtcatccattggtattggtaatgacattctcttttgggagacagctaagctcatgtgttgggcctctgctcagctgcaccagctgttacaaactttgtactaaggagctgtgttgttggaaatgccccatgtccacattgcagtcaagactctatcctgtattcctgtgaccagaaagcaactggtatttttttatgctgcccttcctcagtggggcccaggaaactgtctgttcctttgatatccatcaatcatacaaatgagtgttgctctgcagaacttgccgataactggtgtgctcaggtagaagcatgccatcccattcaagggcactgcaaatcctgccatctgtgattggcggtcctatctcagaggggaggattggtccttcagtgaaccaagtcatcacgctatctgagatatggctgtcttccatgatagcaatttctagcaaaatcctattctcatttcatccacaaaaaatgagctgtactgtccagaatgggcctgtatttcatccctgtaatgctctctggtaaacatgaaggatcagtatattttcctcaagtcctgacctttcattctcaaggtgataaaaaaatgtcaaagcaatcttctctggttttaaagcaaataatcatagagcttcttgcactagcctgaatttcaccttcccacatctagccagataagtaaaagaatagatagcaggctggaagataaggggacaaagattacgagaagtgtttattgagaaagaaatggaacacgtcctgtttcacgagttaacagcacagtgtgtgaagtggctggttacaaggatgaccccagtgaatttgtgaacggctctgccaactccagtgtcattaatgagagtcacctgataagggggatagaaccatttgtttctaaataaagtattcattcaacttcatttaggtttagatttacttcccataaagaatacagatatttgtactccagttttcagagtccttggtaactgtgcttggtcagcaagtcagtgtcattttcttgcagctttcaggtgcaagtggccaacactgagcattcccttactccctgctatctttggcacaatttctggcttcttaaatgtaaaaccacgggtttaaggtggctaatgatactacagaaacacggctgttaagaatctatctccatgttaagtacaagtttttgttgagatttatttacaagaggagggcagaagtgtagacttttgataagccatcttcagaagtgagcaggagaaagacaggcagaggattctgagtagcatggccaagattctccaaacaatcctttctgaaggaggagacagagggaacagaagtgtttctcctgagccactggtgctggtagttcacgtcctgggtttttttctgtaagaatacagtatagagctgggcatgatggcacatgcctttgggcatggtggccctgcccacctttcagccctgcactagggaggaagaggcaggaggatctctgtgagttccagcctagtctacatagtgagttccatgacatccagtcctatgtagagagaccctgtcgcaaaacaaacaaaacaaaaaagtaaaaaatatatataaaataaaaagcatacagtatagggatagctggtcaccttgcaatgtggctttttcaatttaggcagcccattttgcaacacaacttggagatggcttgccactgttgcttctgccccacagggcagagaggaccaagggcagtgaagtgacagccttgtgaagtggacctgagtgtacatgaagaatgaagccttgaagccttgtttggctctgagcacatccagcctttgggagagctgcctttgtaatgcatttattcactgccaacagggactctctccctggagggagcttaagcctggaagttataaatgattgactgtgccatcatagagtttcaccataatacatttctgcttcagggctgaaacacagtaagccagcaacttgatttctcatcccagagctcctgatggtggtctggtgggctccaaagtacacctcagctggaattgcagggatttggttggttggttggttggttgtttattttgagaaagtgtttctctgcatagccctggctggttctaggactcactttgtagaccaggctggcctcaaactcatagagattcgcctgtccctgcttctcaagtgttgggattaaaagcatgtgccaccactgtctagcttggaattgcagttttgattcaagtacaaggagagtatcttatttcacattgatagttcattactgatctctgtcttgcaaattgtatgaaaataataaatatacacacatatacatacagttctatactgaacactggctaaacagctaccagcatcccaatacagtacatggaataaaaaaccctctcccttcccctagccccacaactatcttaaaactattattgcagaactatgttgatccttctttttctttagattagtttgagagtggctaaagatgaggtcaaaatggaaaatttggcagtaggtggggctattaagatgcatcatatctataaaaagtgagaaggcaaaggaagtcacgccaatagaaagcctgagtaaaaatttgtagccaataataatattgtttaaaaaccccaaacactggtctatgcacgagaaagcaatttctcttccatatccattacctaattccaacagttaactgcatcatatacttccagactttgttttatagagttagaaaacccagataatacaactgtctcaatttcctttcattctaccccaccccaaattccccaacccagagaacaaaggctataaagccaaatatagaaaataatctggaggtctatttatcaaactaaatgtacagttgactcttagtgtttctctcattcattaatgttggagtttgccagatggcttccgtggagatgtctgcctcatcccagtcacctgaaagctgggcctctagaactgtgaggtctgggtgaatgatatggtatcagatttgtccactgcaaagccgccattgacgtaggacttcttggtatccgagtcttcgctatcaaggattgtgggttccaaagcaaaggggttcacgatgttgacttcagatgaaacatccatctgctccaactccttcttggagagcttctccacaatgccggtcccaaatgcatctcccagaacgttcaccatggtcctgaaccggtccctggcaaagagacaggagaatcagaatgggcccagatttcatcttcctccactgatgtgtggagaaagaaaagtttctgatgagtgcagtgcagaatgctgttctcctggctcggcagatgcctcactggcctggggcagaaggtggctcccaaagggacagaatgagaaaatgggctctacttggcccatgctcccagaaagtagcaatgacctctcagtccccagaaattccctcattttttcccaaataagaatggggtctccacagagatacatggaggataccaaggatggctcagaactcagtaagtctttgagctctgacttcgtttttgtgcctttcctaggtattatgcactggtattaaggactctcttggctaaggtgagggaatctgaacatttggttggggtggatggtgccaagtatgtaggcctcaggtgtgtccccggtgtattcatttctttactaaataaggtcattccatgaacaacccggtaaagacatggaagaacatagcatccaaaagatataggccagcccagagatggattcctctatgatacaccctccatttgtcgtaatcccaggcagaccggagaagaggccagtggcaggaaggcctatagtgaaagcctacagagggcgtgctcattttgatactgaggatgtggtgaaaactgtgaacatggggaccctggtgagatgacatttgtgagacaggaaaggccaacattgactgtatatgacactgtggatgcccttctaacaggagtagtaccacagactgtcctggcctagcatccttgcatcctatagtttgggccttacacttaccttggtagagagtcactgcttctaggaaaagccagggttcaaattagcctggtttctttctttacctgagatgcccattctgtgcagtgtcacggcttccaagtcaggtacatggttagaacctccacagcatgactgcttccctttctccactcttagctgctgtatacattgtacaacctggtctctctctctaatctgaaacgaggttcagtatggagctacacttaactctgatggctaggggtagagccacaaccttggtactggaaggtagatgtgtgtttcaaaactaaagccaaagaccaggctgctccaccttcaactttgggcatcaagggggcaattctcacacagatgttctgtgtatgggggatgtgtgtataagacagaagagagctgtctgggggctaagtggtttgactcattgccatcacaacaatagaactttccgtatgttgattatgaactgaactgccaggcatacttctagacacttggctcagatgagcccatttggttcctacaacaagctactgaggtaggcataactttccccatctcataaataaaaatgggcctcagagtggttaaggaacgtgctcaaggtctcaaacctcttaagataccagatgaggatgtgaacacaggcgtatgctaaaacctttgctcatgccaccagcccagaggattccaaagatacctggaaagatgcagtaacttcgaagcaggtggtcccgtgtttatgaagccgacttggggctgggatacctggggatggctacggggccttgccccacttcttcactatactgtctcctatttaatcttgttctctaaccgtaagtgccaccacctataccatgagctgatggagctcactggcttttgagaacccctgctgaagttacaaaagagttaaatttaagcatgttaaccagacggcttggccaaaaggaagcgaaagcagcaacagatggctcattaggcattgtgaggaggaaagcagagcacagcaaagattctgcatggctaggaagctgcctgcccaaccagcagaggcaggggtatttattccaactcacaggagccagtccacagcgatgatgagggtgacatcctcagcaggcaggcctacagcactcagcacgatcaccatggtcaccaggccagcctgcggcacgccagcagctccaatgctggcagctgtggatgtgatactgtagccaaaacacaatagcaggaaagggttagaccgaaacaggctccgtggctggtactgttatgttactatagtgggtttttgttttgttttgttttgttttcaagacagggtttctttgcattgctttggagcctgtcctggaacttgctctgtagaccaggctggctttgaactcacagagatccacctgcctctgcctcctgagtgttgggattaaaggcgtgtgtcaccaacgcccagcatgctcctatagtggacagttagaacttactgttaaataaccagttccgactcatgtgtatctgttatctatctgtctataatccatccatccacccatctaacacacacacacacacacacacacacacacacacacacacacacacacacacacgatgggagctcctggggcttacgaggaacaggatatcatggcagcaggaaagcatttggcaggtcaccctaaacaaggaaatatagaatagcaacaagtgacatcaatgctgagacagaattactcaggatggtaggaattttttattcaaggctttatctgcccacccaaagcctccatcctaagtgtcagaaccctctctacttgtgtccttcctccttcagtctctgctgctcaatcatttacagagcactcagtatgcgccaggaatttctgttgcctgggaaggtggctagagggacagtggagtagatgggcaggggtgtgtgagatgaaggcaaacagatggagcaatggttaagcaggttttacgtaatttccccatatcacaagactctagccttccccaagaacacctgttcagggcactgacttgagaaactgtgaccccatccaaagtacagcattcctgactggtccttcattccagcaggtgcactttatgccaaaggaggagacatctggagcccagggtaggttgccacaggaacttagttaccaagtattgaacaaaattccccttgcgcacacaaataggacagggatttttctcctggcaataagcagtttctcaccagcagtatgtttattttaattgggtaattctggagaaatcaaggctcactgtgctctgaaagtcctttgaattgaatgagctggcagggacacccgtagtgacttccagaactatgcctcaccctcaggctaaagtaccacttccagatgcgggtgggctgaaaggcaaaggtgtggaaactgctgagttaaactagatgaagcccagatctagccacattcatatccctctgggttccaaaggtctctgcattctcagaaaacagattctgctgcctggtcatctgcctagtgttgtgttctagaggctgctcaccagttaaaagccagtcagactctttgcctagtactaaaacatcccagtttttttcatggctatggctaccagtttgcagtgacttaagagagttctggagctgtaccgacatgtctaaagtttgaggcttacatcatccttcagagccgtccttcctcagacctctttggaaaaatccaactttatttccatgctggttgaaaaagaatttaaacaatgcatcagtgggttttctttgtagaaagagccatgtgcccaggctcattgatcccccttggaagcctcaacatgtcatggttagccatgttcttacaagcttgaggctggacttcagaatccattcagtctgcccttgagccttgaccttgctcactgaacttctgtcatttgactggcttttggtgtgacattcagaacattgtgtcttcagataaggggaaatatatgaaaacctgctcatctgcttcaacatttcctgcttcagcagaaaggttttcagcttctgggatacagggttctctcccagcatgcaggagcagcaggattggaggcaaggctgtgaagtagtgtggacacagctgtccgagtcagacacatctggctccattcctggttctgccaatttgctatgagcattttcttcagcagttgagcatttctctgatctcaactccttgcctggatttgagggatcggatgtcttttatgtagacaaagttgtatcaagatcaggatagtacctgtgcagcaaactataaatatgccgcttttgctgttctgctaggatcaatacacatgatgctctgagtacagcggccactacccactgctggttgagcacactgagggacccggaggctagcagctgcctggtaggcaggcaggcagggcaaaggggctctaggcagatgaatgtaccttcccataaacatttaggatggctgacttcctcctccctaagacaaagacttgatgtttgtcctgccagaggggactatgtagtattgacctctacatggagggaggggctctgattgtgggaaccaatcagcttttctttgtccagattacccaatcctttgcaacagcccaaaccagccaatcctgagggagaaagggaactcatcagccctcaaacttttgttttgtttgaaagttttggctctgccaggaaaacctcagattctggtttccggatcctctttacttctgggggagcttgtctctctatgtggtgtggtatggtgtgtgtgtgtttctgttttcaataaaatctggctgagtgctgagaccttgccttgccttgcctgtctttttattctttaaatcagcagaggactctgttcctgtagccccagtcaacttcaccacgatgatgtcagtatctcttctggaaattcaacatcctaaatgctccaaaatttaagactaatgtgacaatatgaatggaaaattccacacatgatctcacagtcaaaacctaagcacaccacaaatacttcatatgtgtatgagtatatatggctatgtataaagtatgcatgaagcataaatgaagctggcccagtttcatcaaccctgagataactggaatctcattctgtcactcagacacagtgcaaaccaacagggccgtccgcagtgatgggactcttccacgcctgtgctacccaattcagtcagccattggccgcacaggactagaggctgcataatgccgtcctaggaaacaactgtagcagaattcaccagggccatttcaaacacctcctcagtcttcatttgccttgaattctttttggcgtcagacactgagccattttaatccttgaaaataaaccactctaggtttccacaatgcccctggcttcctcctacctcctgttctcctttcctccctcctatctacctctaatgggattttctgaggctttgcactgtttccccttctttacaaactctttctgcataatgtcacccattcctaacatttactggggactcgctgtgtaggcaccaagactttataaacatcctcttactaattatcatatttgaataaatcataggcgctattatttcctccacttacaaatgagaaaacagagcttagagaacttaagcttgcccaaggttacagttataactagtcatagtgttactgattcagactcctgacttggcgcccacatgtcctatgaccactgttaagtggctgacccttacttttgggtttgtagttcagatctatatcctcaatcatttttcttaatttatggtgttttaaattttctttttcttttggtttttcaagaaaggctttctctgtgtagctcaggctatcctggaacgcactctatagaccaggctgatcccgaattcaagagatctgcctgcctctgccttccaactgctggaattaaaggagtgtaccactactgcctggcttaaatttactttttttttttttttttttttttgtgtgtgtgtgtgtgtgtgtgtgtgtgtgtgtgtgtgtgtgtgtttgcctgtacacatgagggtatatgcgtatgagtacaggcacctatgtaggacagagacactggctcccctggagctggatttctaggcagttttgagctacccagcatggatagcttcttgggtcccctggaagcagttctctcaactactgagttaccactccagcccctacaattcttaaaggcattcaaattcaacgtgtcaagaagtatataccattttccccttgtttttgcttctcttgttctcacgcgctcaaatcacccatcttagccttttcctggcccttagcctgaaaccagatggcagctctatgattcgctaactcagaggtgaacccaatgtgtgtgtgtgtgtgtgtgtgtgtgtgtgtgtgtgtgtgtatacatatacatatacatatacatatacatatacatatacatatacatatacatatacatatacatatacatatacatatacatttatatatatatcttgatagaggccatttggtgacttactgatcttctagtttgtggtccctgctcccatccaagccttccatcatactgctagttatctctttaaaattcaaacctatccatgatattataaactgttgtattagatcctctacacagggctcttatggccaaagaatctggactctgattaggccatgagatactttcgctgttctgagctcttagcttttgtctttttcctgctaaattcttattcctcatctaagattcacctgtacttcccgcccctctaggaatccttcccttctcttcctaggtagagtcgatccttccctcattaggtccatcctgtgaccccaattaattttccatgagagtcctaacacagatccagtatttatttggtatttaaccgcctccccattcacaagggactcctgttagagcaggggctcatgcttatttaaccttgagtcttgggtgtttaatctgtgcctggcattgtctggcacctactggtcccattaagcttagcagagggatgcctcaggtacccagaccctgaagctggagttgcatgtgccatgagtccaccccctgtctttatctctggcagggattcataaaccaatagaacatcccatctcgaggtccctcttggtttgtctgcatggatcacgtttacttgaggcagttcaaggagcagtgatgcaaatgagagcgacactgtgcctcacctgatggtgatgatctgcccaatgctcaagtccaagccattcagctgtgcaataaacacagctgccacggcttcatagagtgcagtgccatccatgttgatggtggcaccaacaggcagcacaaatcttgtgatcctcttatccacctggttcttttcttctgcacagcggaatgtaactggtagggttgctgaactgtgggatcaatggaagcaaatttaggtctaaaaaccaccaggcctcggtctccacccaaaaagtatgcctgtggtctaaaaagtgaacaaagggccccagagcatgctggcaattaagaaaataatttattattttatttttacttgcatgggtgttttgcctgaaggcatgtctgtgtgtctggtgaccatggaggtcagaaggggatgttggttctcctggaattggagttacagtagtttgtgagccattatgtgggtgctgggacttgaacctcggacctctccagcctgtatgctggtactttgggccaatcccggaattggaaggtgctgtgcctactcctgccccctgtgacaccacgatgttttctgggtatcgggccacagctagagtataggaagtattcaaaagggtggagaaatacattcaaggagatggacagagaatacaggcaccatctctcaaaggtgtctatccaaccagaagctggagtcatcttcaccaagtgacagaagtgacaaagcatcgtctggaggcgacactcttctagttacctggaagatatcatgagagctgtcaggagagcctgcgccatgcccaaggcaaattggaaagggtttttccgcacaattatgaagtagatgagaggcaggactacaatggagtggatggcaagcctgtagacaagagggagaaagtcttaataccacttcctcaggcttgagcctggttttcaatctctttttaaaatgacgacatcattaaacttgcataaaaactcaatgagacgggcatgctccctccaaggtcacatctgtccccaaccatgctacctcattattgctttcatcacagcccaccccatcctgtcctctggactaggttcggggatgatgtctactatttaagaaggaagccagagtcgcaataaagagaaacttgcactttaggtctggcccccatttcttttattattcctgtcttcccaaagtgcctcacgtaggaatctactggttactctaagtggggttgactaaatgagagccactagtagtctgtgtgtacacagtggcaagtggatggttcagttagacaagattgaatagtaagtggtgatcactacaaataggaatcttgagggcctgaggagagagtcctcttagtccagagaatcatgagatcttagctatgatgtttagttttcggttagaaacataaatagagcaagagtcaagaactcaacagacccccattatgaaatggcttattatccccggtctcagccacgtcactgcccaccacagcccctggtattgcctgtctcagcagctctagtgcagggctgtagaagggagaagccctgcctctctgatctctgtggcctcaactctgacactcacgctgtaggaccaggctgcctctgtatggctggaaagccgtgtttttggcacactggggttaacaaccaatgctgtgtttgggaactcctctctgtagccaggttctgagagggaagctaatggctcaagttgagtgtttggcccatggaaagcaaatcagtggcatttactctttctcttgctccacatttcttagtagatgggaccattctgtccttggccagatgtttggtggcaccattcataacctatgacatctcttctgagggagccaacagctgtgttgtaagggactcaacctcgcaccttcttgtttgttttatggcctctgaaaggtatcagacacttgctgaatagcctgatgatcgctccagcaccctgacaccctggtgacacaagacacagcagtagccaccaacccagcaagaacatcagaagcaaaaccagtcctacatgcttcagatggaatttatttaggtccttctttctttcagccttgggatatgtgggaggcattctttcctgcttggctagtttacagtctaaaggaagtaaagggcaggagatagccccaagagccctcaaatgaattttttctcttgttttaaacccaaaccaatagaggcaatgacaaaagctggtccaagctgttctgccaggagctgaaaattagcacagcatgacacacctacggcacagctgttaaagggcagccttgatgctctcttatctccaaaccccatctctccctgcacatgggagaaaagccgtgtctagccagctacactcagtcatcctagggcatcagccatggattctgtttcttctcttgacatacccactcaggacagtggccatgtaaaggcccagcttgcggaatatttcccagtcttccacttctatgatcttcccagcaattaggaacaaaataccgatcggcatgtagctagaaagcaaacacaggccaagtcacaattcagtcatcagagcgtttctcagacaggatgctggggagggaacaagctagtgtgggcatgctcagtgcgcatgctcacacccctgggagggccgctggctacaatcgggaagtcaggggttcagcttcaaatccagcatgcacaactgtctttagagtatctgcatgctatcttcatcctactcaccccaaattaagggcagctggtaagaatgtgcactacagaagcacccatgcagtgcacaccccccagtgactgtcataagagcaaaatctttccatctatatcttgcttctcaggtgtcatcgatagaggcgagggtagcagcagtggggtgagcacgatagctccgtttgtggagctctatctagcgatgtcttatgccagggaagtattttacacacatcatttcacctaatgttcttcccccagccctgggggtaggttttactatctttttcttacagaggatgaagctaaggttttagtgggattaagtgatttccttggctgttaccaccggacattttactgtcggtttctaccctttggattataaaatgttgagccaattccacgtgagcgaggggagggagaggtctcccatgaaagctgaacttttgggcatctcagaagcaggacagacaggccgtgtctttggatgccagaagagttttctcgttcagatgtggtcatgcccaggctagaacagttgggatattttgaatttcatttctgtgtagggcctaagaagaaaagcacctggtgttcatattccgaaggaactttctcagatcctttccaacaggaatgctgggtaggtataggctgctcttcaggcctctgaggcaagagataactgctactcccaaggagggtgtgaaattaattaatactccagtcttgattttaaatgtccaccttctttagggaggacctgctgaggaatgttctttcatgttccacaaaggtgttatcaggggaagggaaatggtgcccatcagcactgctcaccacatgatgatctggacgattttcatggttgcgtcactcaatgcgttgaagaaatccaccagaatctgccccttttctcccattttcccaatgacaagtccgaagacaaggcaaaagataattaagcccaagacgttgatgccatctgaatacaggcccacaattttgtattcctttgtcttgttctgtggatcaaaaccaagaaaatacactgaaaacatgctgggaattgtagcgatccaagtcagaggtataatgatgatgagggaagcctacccatgaaacactttgccctcagccactcgtttaagttgtttttttaaacaagtccatctgtgaacatgtcttttgaaaatttccaatgttgcaatgttgtaaatttttatgaattttagaattggggcattttttcagggttaaccactagctacatttggagacttgtttttaaaaggatagaaattaataatacaagaactacatagtgtttaccagcatgaacatttagaggacattataccatctgttccctcctgataatgaatctgagggagattcatcactgccttcagtctgatgtgaccaacaggattttaaagatatgaaaactagccagacatctgtactatgaatcatgttttcattctgagcaaaaagtagcacgagatttactaagagatagcatagtctgtgtggggcaggccaggtctataaagaattgtgctgatgagccactggggtaccagtcatttcttatgtgtggcagaacaaatgtttatggtgcagctagaatgttctaactgcacaggctgtggcacaaggttcttaaaatttagctgaagacataggatgagctgtgagaaacccaagtcaatactaagatgatagctgattaactgcacagccactgtatgagttgcaagtgtcacacagaaactaggatgtgcatgatgtctgtgacgttagggaaagctaggtgaggggtaggtatcttagttagcatttctattactgtgaagggacatcatggccctggcaactcttacaaaggaaaacatttaatggagatggcagcttatggtttcagaggtttaatctattatcatcatggtgaggcacggtggtgtgcaggcagatatggtattagagctgagagtcctacatcttgattggcaagcaacaggaagtgaactgagacactgggtgtggcttgagcatatatatgagcaaagcccgcctccacagtgacatacttcctccaacaaggccacacccactgaaacaaagccacacttcctaatagtgctactccttttgggggccattttctttcaaaccaccacagtacccaagagacaaagcatgttcaagaaagatattcgtcataggcagaaggtgtgatgcacctggcctctgtaacctccaatgattcttcctcaacctttatggccccagtgttcccaaagcaccctgctttctctgatgatgacattcatcattccttgcctgagaatatgaccaatctgtcatttgtcacatgatgtcatatctgtccttccactatcctcttaatgtgcagtagcaactccaatatggaggatgctcagaaaactgtgaaatcttatcaaaaacgaggagtaaggagcaagtaaagggtagatctgcatagaagagagccccacctccaacctggaggcaagaagaagcctggccacagagggcccgtggtcatagttgggagaaatgaaggctttttgcagtaggaagcagggaaccaacaatggcctactgaatttaaattatatttattcacatatttattacatgtgtgtgtgttatgtatgtggggatactcatggaggccagaagagggtatcagaacccccagtgtgggtgctgggaactgaacccaagtcctctggaagatcagcaagtacttttaatcactgagccatctctccagccccctacttatttatttagacagggactcactcagtagccctgggtggcttcaaactcatgaccttgctttaacctcttaagtgctaggcttacaagcatgcaccattatggccactttaatttaattaataagttgactgaatattctttgccctaaatctctctcctgccctccccacttctctctcccactttaaagccagaacaagtatttcctttgggaaattcattcagaagtctattgtgggcctacaaagtaccacttcaggcccacagatttgattctccaattccaaaacttcaatagctctcaaagcctgttgattttcttgatgactttatggtatactctggtggcaaaatctactctgaatggagatgaggccactgtgtttctgatgtggcagaacatacatgagtttgttgcagaaacattggtggcacttgatcctggagtggtgctgggttccatgtagggaacctggcacacatgccatgaggccctgtgaagtctaagatgatccaggctcacatactgctgagagattcaggcaaggagccagggcctgtattctgtgtttatagccccataaacctaaaactgtgcccaaggaatggagaggccgaggtacagagacaaggctcattgttttctctctaagaatagttgatgctctttactcttggtaaagagtaaagtccccatgaccaccatgttagcactccatggagaggtaacgagccttctcacatcatttatatcaatcaatcagtgcatgccattgcttaatgtgtttctatttagaggtgtctgctttcctatatcttgattcattaacttggaattcacagctaacaggactagacttaacgcctgaatgaagcttctctaacacatatttttttttctgcaaagtgcatcaccctgttcttgtacttagaaacattacagagtattttattaccatgcttcaatccattttatacagtaaaatcaacagatagtcagggagatacaaattaaaggtgcactgagattccatcttaccccagtcacaatggctgttgttaggaaaacaagtaagtgctggcaaggatgcagaggcattgcagatataatctagcagtacctctcctgggtacacactcgaagtccccacagcacagagataccttgatgtttattgtagcactatccacaacagccgagatatgggctggacgctcactggcagatgaatggatagaggacatgtggcatgtatatatatatatatatatatatatatatatatatatatatagtggcatttcattcatccgtaaagatgagtgaaattacgccatttgcaagaaaaaagaagtataaatggaactcacacaaaatatgccagactcaaatattgcatgttttctcttctatatggaccccagattgaaaagtctatagggcagggacgcagcttgtgcctattgcatgagagcagagggagttcttagggagaacatagcagagaagacaatggggagactaggagcaaagtgcatgagaatatgtgagtgccccccaaattacaatcattattatgcattcatgagagaaagagagagagagagagagagagagagagagagagagagagagagagagcatgaactggagaaatagctcaaggatagaatgcttgtctggcatgcaggagacccaaggctgaattcccagtatccctgaccacacacacacacacacacacacacacacacacacacacacacacacacacacacagagtcagcgaaagagatcctcactcaatgtaacacaggacaaaattaaacaaacagactgcaaaatcactgagaagatgcatgaaaggaaaataaaggtgagataaaacatacaccaacatgtatgtatgtttgtttattgaatgaaaaccaaaatgaagatatatcgtagcctcgttcaaactcagtttggattcaggtactgtgggtgactcagttttgtgccactcttgagggactccaaaaggtttctgggctacagatacatttggagaagaggtactcgaaaagtggatgttatgcataacaaagctaaatgcctttctctctcctgccactcaagactggcgcatgcatgctggggagggtggggtggcagatggtaccttagacattgttgtcatggcggtggtgacagacatctctgtcacattccccccaggatcactgacaggcttcacttcttcacgcttggttttgtactgcacattggagaaaaacaattgctcacaaagtaaaaagattttttttttagcatccaattggggctacaccacagggatattatcttgaccaaataactgtcaccgaagggctgtaatggtggttcatttgttgcttctagtttttgatgatctttctcaggaggcattgagactgaaaaatgggatctaaaaatccaaactccagacttccacagtggccattcaataatacaagaatgtccccccccttttatgatgggaaaatgagtggatgcaaaaagaagcaggttttatctgtaggtactttcaccgacatggggattcctgccaacctttttttgtttttataaatgatcatttttaatctgggaaaataaccttagcactttgataaaaacagtcacagtgactaataagttccaagaaaggggtaactgggtggttgtatccacatcaacagcacctccagagctatgttgtgagattcctgttgaattcctcccttcatcccgccctgtttagttctgtgaggcttcaatcacggtggattgagaaaaagccactatattatggtgctggaaagaaatgtcctccatacagaatctctgccaacttcgaaccctacaaacggccactgtaactgagctgcaaaggcaccccataaatagaggtggctctgttcctggtgggggctgcaggacaatgatgtatttgccacttttattggtatatatagaagtctctgtccatgtaatttatgtaaatgaatacagcagtttgtgataggctcagctgtcttagggagcccatataaacagaaaagggattttcagtggagtgaagacaacagtaaacattcataagaaatctaaaacagccatggctttgctgcggagctccagcaatggacatctaatattaaggaaaagacccagttgagggtgggccggccaacatggtgtgggttagacacccatggtcaccatgaaagggaagggaaggaagagatggacagcccttctgtccactgcactgcatctacaggaagtccaagtttttacaaatacaacatggctctccaaaagacaaacaaataaaatagtacaagttggcaaattcttgcctttctctatgtgaggggaagagaactctgttaaccatggcatgatttcactacagccctaaagacaagagttgtctgaaaccccatcggtcacaggtgtactttctgctgtcaggtgttgactggctaattggatttctgtgtctttgtagaaaacgaagtctcagtgggtcatggggacagagagataactcaagagcaaaaccactaatgttacctgctgaaaacaggcttgcaccaggttctcagggaacatgttcctgttggagacacggagagcttgattatatcagggaaacaggtgctttcagttggtaaactatatatcaatagaattgagaatagcaatattccagcaatatatccagaaactggatagatattccagtttctcttctggcttctgctttgcataataccctttgctgagtcccccacccctgtcaactgccactttaacagattccttaaacgacacccttactgttatttcggaaatgctgcacaggcagatggatactcagagtcgagacagttgtttgattttctgtatctttccattttcataagtctgttgcaaattctatcataatttaccgagttaaacatgtgaaccaatgaaatatgggtatgaaagaaattgtatgggtcctataaatagctaagttacataccctggagactcaagaaacccaagtgactatattttctgtggttgagttaggtatggtaggacagttgatatataaagagaaaactacggatttaagtatttggctttcttggcaatttctcatgattgggttgctccactctatggaaacagaacctagtgattctcacaatgcatttgtaagtcagcaaattcagcagaaattatatgaaattacagtagatggtcacaagtagagccaaccgtggtcctacattgccaaactgctcaatatgcacatatcctgaacatatccagaacaagcttctccatttgttctgcttgaattgacacctttcaattcattaatttgtttgtggtactgaccaccttagaaagaagggtttctctgtataatagaaacatgaatttccctaagtaaccttcagaactggccacctagttctgcccagcatccttatgtaacaagggtatttcctcctacctgtccacgctaagtcttcaggcaggggcctgttctatccattgctttctgaaccatgcttggggagtagaaattaccagctatgtaatttgtaggactcatagcaaaattgaagatgcatattaacttaaatactattaaaaatgttaagatattggactgggggtggttcagtaggtaaagttcttgctgcaagagcatgaggatctgagttcaaatcctcagaacttatgtaaagctgggcacagtcatccatacttataatctcagtgatgtatggtaaaaaggggggcaaatacagaggaatctgcagaatctcaagggcgagctgtcccagcatacacagcacaaaaggcaacaaaaagatcctcactcaaataaggcagaaggagagagtcagcgactgatgttgttttctgacttccacatatgtgcaccatacacacactcatttaacacacacctacaaatgttaagacactggagcattaagtcactcatgggccttgtgcaactgtacagacaacccatccaggaagtcaccactggcaagtctcacctgatcaggtccaacatggcatccactgtgctgacttcagggcttttgcctgtcctgctgatttcactcactttctgagagacaccaggcttaatgctcacaaccagcacaatacctgtggccaaggacagtattcacagagaattaaaagcttccagggcagccaggatcctggggcggtctttagaggaccaggggacatggtggtcaaggcaatattgtgccatggagggcccccaagttctcaacaaagtgctaatccctaattacgaccttacccccaacccactgaagtgaataagtgcattaatggagaagtctccttgcttttctttttaatgaatgagtgacttctagaattgcttttggacacaccaggtccatctttctcctgctgttcagtctatgaaatcagccacagaaggatttgaaataaaagcacattagattgatgcctttccgttatttccacctgtagatacaagacaccctttctggaactgtcatctaaaaatattctaccgccctagattaattatctggcttaagattatataaactcttggccttacttctttctccccagtaatactgacagggcacaaaaatatcactttttctctgcttcttattggagactttgagacctagtactatggtcaaaattttgtcaaaaattgcattttcttcacataaaaggtgttatgcagactcgaaggcagcaaaggcctgggatactttgacaatattactttctggctgaaaatatgcattttaagaagcccagttactttttgaagacaaagcgacaaatacatagaggaagaaggaatcagaaaaaagcatcaccgaggatcacagcaatgatggtggtgcagaagtaatacactacggcacgcagaccaatttttcccgatacattggaatccagtgcagcgacacctagagggggaggggagaaaggtcaagtcacagctcaaaggcagatttccagggctagggacactaataaggagctgagaggtccatctcacacagttcatcaggtgtagcaaagactttaaaattgtaaatgcagaattcagaagtggaagccagtgtggacacaaactccctacacagctcatttccacagccatggcctctggttttcttgaggctggtcatacaatagaaactgtcccccttctacaggtgatgtatggagagttaggatctgcacataatatcactcaagagcagagataaacctctttgaaattcagtattgaggaaccacttatctagaaccaagttaattatcttattgtgcagtgacactcctacaaatcacagttgtggtcatctctgtcttttctatcaggaggctcaagctgagaagataacatctgcctacaattattaaggtaatagatattgatcacccctgcccacaaacacacttcatctcaccagctatagttagcattctactaaattttcttctcaaagtttgtaagcatagataagtttatagttaacacaagactactagtcttcaccctcacaaacttaccctaagggtgattttaattggtgtataatcatttgacatgtggctggactgcaatgtgctttttggtcccttgttgttggatctctagattgtctctgaacctaactcaataataaaccatgataatttcattatccaccctagcatatttaccagctcttttcatgatttccaaattattcctagctgaacaaatgtatgatgctactgtgagatacctcaaaaatctaagactggaaggatacagataatttccatggcactggaaagtcaagagacttaatggccacattgtttgctctactttcaaacagtcttagctaccaataaaataaatcgaatgttgtctagtcttttgaggtttgtttgaagggacaaattgtgctgtgcttaaacattcctgaaataaataactctgggtcagactctgcaggtttgagtcaatgtcagctattgagtcccactgaaccaaattttcttcttgccctccctggaccaacatccccctggaccaacactctgctggccatggtgtttgcagagaaccccccaccccacccccgacacacacacggggcaatctcatgcctggttcctccccttttctctgtttcttcttcccaggagatgaagtacctctcaccatcatgagttcagtgcctccacctcgactttaggactcagcagacaacaaaaagctttctaaaaatgggatccttgatggaaatatgttacacagatacatcccaagtggctgcagtgactctctcgggctcacccttaggaacagctttatttccatttttcttgtgtctctgtcattaatgtttcccagccagacaaaattttactaaaatcaacaatcatacttctctaatattgtctattctttctaccattatagtcacaaaaaagggagggtaccacagcccccaaacccaggcttttggaagatttacaacacaccatggggggggggttgggaggttggcaactactatagaaagaaggaacatagggaaaacagctatatcttcaaaactattactgaaaggattatgaaatatctgtctgggtaaaaagaatccttcatatctgtagaagaagttgataatggtaacactgtcttgagcaatggatgctcattgaccacaaatatcctttaattctcgttttaactcaacgaggtaggcattattagcccatttttagagaccataaatctttggctcagataggctatacaacatgccctcaagctatggaagtaagcaatggagctaggattccaacacaggtttgaccccaaaatccacatttttttttttttggtagagctgtattcacatttaaaattttttccttatatttttatttaaattaaaaacaatcttattttacatactgatcccagttccctctccctcctgtccttccatgccccccccacctaccccgcatgccaccccaaccactccccagggagggtgaggcctcccacgggagatcatcaaagtctgtcacatttatgcaccacgacacatcagcttcttccgtgcactagttccaaagcagcactgcctagtaggccttcctgttctgtagaaattgtctgtgtttactctgtcctctgaagtaacctcaagctacatatggctatcgaacacttgccaggtgtctaagtgactgaagcactgaattataattttgcttaattgaaatgaatctctattcaaatagccacatgtgactcatggctaccaaccatatggacaacatagcgcgatctccacacctcaccagactgttgcgcactaaatgggcactcagccatgccaagggaacaaacttagacttaatggcattaaggaaactccttgaaccctctccaccttgccatcacaggggcagtagagaggattacacaataagctacattctcttgcatgctgtcccctactgtttcaagctagaactcaagcttgtccttagaagtgaggggcacctgctggctctttattttagggaaaaggcattttctttatttatctcaggaggatgctctgaggagcaatgatcgggggtgttggtgcttggccaacggataatcatctgaactttttataacaacactacaaaggaagcagggtgggctaaacaataggcggctttaaaaataaatatccgaaggcaacaagagacttctcaagagtgctcactgacgaagctgccacccacctgaatgaagtcttcgtgacaacctctatatctcctagtcagggtgtcaagatgaactgtcaccggagtctagtatttgctagcgctcccgaggtctgagtggccagagcatccaagctcagtgtgacacaggagttaaacaaccgtgtgagtgactccagctctgtcaccagccgagaagccagttgcacgaagaggaataagcatgggctttgttcccaaactcggttcattcatgtacacagtggtctttaaaagccagctctccttcaagttgatattgaggggcaagctgaacaggctggcttgcacagcctgtgagcattagagctgccaccgtctacacctgtggcatcagtggctggtgatgtgtgttactgagcaacaaaacacacctcagaagcattctcattatccattccccctccttcatccttcactgcactgtcagtcaatataccttttaaaaatatcaaaaaaaactttcagattccagtataattgttcagtggcactgaggataaaatagtaaactctcaccctggggtatgagacccaaccgacgcatctccagcctgcatgtgtacctgatggacgtgtcactccccctgccctcttcactgttagaccaggctcctcctcagggccttcactcaggcccttctctccagctgttattctccattcctcatctggcttttaagtcctttccccgggtcccttctctgagcaccaagggtccatgattggcatcctgtgcctaatgtgtttcacttaaaaataaaaatcaatggtctcattaactaacacttgcctttctcactagactataagcctcataaagtctctctctctctctctctctctctctctctctctctctctctctctctgtctctctgtctacacacacacacacacacacacacacacacacacacacacacacacacacacgtaatgtgtgtgtgagtgactatttaacatatccatgtgtggtggtatagcccagccttctgggaagcagattgttctagaatggaattgtctgttccaggtgctgccctgtgatttatgtgatcttgagaaagtggcttaatcttgttccaaacttctgtttccttatctctacagatggagacaagaccccacccacttgactacttcttagggttgcaatgaggagtaaacaaacatgttaccatttttaaaactgtattttcttttcattctctagggaaaacaaggctgtatacaatcttactttgttaatctagggcactggaaacctcagctttcaagatgaatacttctgggttggaaaaggcagagggaggggctggagagatggctcagcagttaagagcctggctgttcttcagaggtcttgagttcaattctcagcaactacatggtggctcacaaccatctataatgagatcttgtgccctcttctggcataaaggcatacatgcagatagagcactcatatacataaaataaataaataaatccttttatgaaaggcagtgggagcacacagaatgtatttgtttgtgttcatgctttatggcatctgtatttctttttttaagagtttatttatttattatgtatacaacattctgcttccatgtatatctgcacatcagaagagggcaccagatctcataatggatggttgtgagccactatttgctgggaattgaactcaggacctctggaagagcagctgatgctctcaacctctgagccatctctccagcccagcatctatatttcttaatgacactcatacaaagagctcccttgaaacaaggctgcatcagaactctacacttctctgggaagctaacaaaataagctcatcctcagattaaagaagagccatgctgtcatctgctccatgtttgatgccacaaagcctgtcaagaaacagtgagtgggctggggagatggaccaatggctaaagggcttgccatgcaagcatgaggagtggagtttggatcctcagcacccacaaggaaatctgggtgtggtggtacaagtttgcaacccagcatcatgcagaggagacaggtgggccctgggagcttgctagccagccagctaacacacacacacacacacacacacacacacacacacacacacacacacacacacggcatggttattctgctttttgggttttttccgtatcactgaatattggagacattggtgtttggggtcaattgctcaggagatcccacaagctcttcacaaagcttgttatccaatgaacgaattcaacacagtgtagagcattgattctcaacctgtgagtcacgacccccaaacatgtctaagaccattggaaaacatgggtatttacattgcaattcataaccatagcaaaattacagctatgaagtggcactgaaaataacgccttcacaagttttacaagactcaatgtaaaaagtgagtctcttcaaattcttcagcccaattcagttttctctcctctaccctttcattctacagcaccttctcaaaaattaattgataatcccttttctacacagggtcttatgtagcccaaattagatccaaactcactatgccactatgcagccaaggctggccttgaatttctgaccctcctgtctccacctcctatgtgctgggattacaggcttgagttactacacctgccttaaaaccataaggtcacataaggcctcggcttttcttggctaaaaagtaacaggatgccgggtgttggtagctcacgcctgtaatcccagcactcgggaggcagaggcaggtggatcgctgtgagttcgaggccagcctggtctccagagcgagtgccatgacagcctccaaagctacacagagaaaccctgtctggaaaaacaaacaaaaaaataaataaaaaaataaaaaataaaaataaaaaacaatgggagaagagaggtttccttttagcgtataagtcaaacctaaaacattttgccatcctaatgtagaagttaagagtaacaatcactttataatctgtgccaatatttttgaaatcttctgagcacaaagtcaaaatatcttggagaatcttactaccaatacacacccaatcattccagcagtgctatcctggcactgctgtttttgataaatggagggcagacaatttgtattgatgtctagtgtttggtgatgtgtcctgctcaggaaatggactcggtcctgggattcacactcatggcccgggagagaccgggggggggggggagggggagaagggcgtgtcctcagcttggcataaacttggaattcccagagccaccctcgagggacgtttcctcacttgctatgcacatccttgtgtgctgccagcatttgcaggaaacagttaggaatgagcttccccctgatctggggaagaaatatacactgaagtcaacatcgatctgattcagccagacctggacattctccaggccactggctgggtggatatccaacaacccatcaggtactagggttaagtactttgatggaactcacaagcaaatgcccttcgaggcaacaaagacgctgtctccaaggtggatggtctccaatggcacttaaaacaggaagagggcacacttgccgggacagggagtttgggtggcgatgaagcttttcctcgttagaatcaggtgctgggcccaaggtgcgccaagttggactgctctcatgcagaggcagaagcttctccaccatcttggaagcagggtagctaagcagatgggagtcctgtggagcagcacagaccctgaagagccctttatggaagtgactgaatgctggtgtctcagctgcttctgattacacgcctaagtccttggcaacgctgggtcctcatccattctatggagaattgttaagctccttgattagatggaggagtgaaggggaaacttatcaggattagaggtgtgaaggcaggcagccacagcggacagcagggggcacggctgtgctaatggagcgcagtgcacctgggtggcagcgaagagcatcctggaatcctggagtgggatggggaaggccgatcttttcatgggctggtggtgggaaaagctccagccatcagatttactgtactgaagaaatgtgacccagatataaactcgtgagccgcggagacctactcccgagttttcgcagagccgcggttctcaggcagctccaccacttgccccatgatgtctctagtggtttgatagaacacagcttaaaaactgaaactttcaaagggcgttaagcccacatctctcccacgacaggaaagtactctttcttcaggatgcaaatcatggtgagaattctggcttcctatgacaccccgtctctggaaatgcccaacccccctccattctaaagtcaatgtgaggtcttgtgtcagttcagctctacatagttccatgtgcgtttagaaaataagggtattttgttcataaacctgtatatcattatcacctcttgactaaatgattaacaatcacctcacaccatttaatagcaagtctcaattcaaatttctctggtaaacatcatttcctaaccacacatcaccaagaaggatgctcaatgttaaaaaaaaaatacagctataaaatatgtatttttattcccaaaagactttgatgacaaattagttgttgttgttgttgttgttgttgttgtttttcctacaagagcttactctattggtcttggatctgagtcttagcagttcttttgcctctacctatttccagagaacggattcaaccccacccacaacccacagcttccctgacacttcctcctgttttacctctggcccccaagctcccaccaggaatggattaagctgttgccctagggaaaggattttgtaatgggatcaccttatctctgggtgcagaggcaaagacgagtgcaggactggcgtgcagggtaaaagtggcattgctttggcagggaaaagagctggggaagggaagggagcaggggactagcagagacagagtctgaagcacacggtgaagaattcatccactctctgattttcttcttaagcataagaagaaaataaaaacactataaagacacattgtaacaaaaataacacgagttcacctcaaaaatgtgaagaaagcacaattggtcatattttctttctattctcactgaaagactgttaatctttcagttttgggtcaacttttaaaaatgctaatactataaaatacggtccagacggtcacaatgtctcttgtgttgtatttgtttcttttgttcagagctatactggaaacattctcatgggccatttggtatgtatccaagcgggcttttagcagttgcaacatgctagcttatgtgtgtaacaaccattcacactgtcattatgaaagcactatctggcgggtcctatacctgggtcttggaatggatctctacggatataccccctttatgataaaacttgtctaggctcacttgccggaaatgtccgaacatgcttcctgctgccttccggagtgtgtctaagttgatatggtaacagaaaaggtaaaactgagttttctcccctacattcctgccaacactctcccccactaacctaaagattagatacatgagtgtggcagtgccctcctagctgtgtttgctgatgtccctcaagcctttgacctttcattgtttcatatcaaaaggacgaggcatatgtttgctccagctcctggagactggtagagggaaagtggagagctatgggctgcagttgcgacagagctgggctactcatggaatctgagagttctaaattcttcccatacataatgttcaaggccaagctacacaacaaaacttccagactgcaaatctggaagacttttttttttttactttgctgacaagaatgatactgtccaaacatactattataaaagtagcatattcatacacatatttttaccctttcttctaaactttggcttactatataaattctgagttttctttctactctggattagttttttttgttgttgttgttgtttttactttccccataaaccagaagaatcaaactatgtcatacataaagctttgtatagatacatgcaagatattctgtatatgtacaaatatgagtatttttcttgagcgaaagcccaagacttcatattgtctaaaagagtacaagaatcaacttaaggatctctaatagggagaaaattctaagttataactgcaatgcttacagggcaattagagagcacacaatagggaagggtggctggtgactttggtgtcctcaaatgcatttgtgacagctaaattgaacagctgtctcttgctccaggacactattaatgtggggaaacatggacccaatgtttgcagatttgattttttaaatgccagaaatctgggaatttataagacatcttccaaactttaaatgctttcaataatttaaataggcaaacattatacagacaaataacagatcttctgtccccccccccccactcctcaggccattaggctggaaagaaactggtaatttttaaccataattaaacccatgaataaaagtaattaaatgttctctttaggtttctaataagccaagaacaccaaggtcgcttaagaaaaatggtcccacgggcctctggtgtgactggagcttgacacctgggaataggcaactgtggcagcatttcagagaatgcagctggtgacagcaaatgctgacactctcaccacctctaaagtcagactcaacagactgagcctttgccataacactgagaagagagttctggaaggaggacatgtcaaggctcctaattgcatagttacataaaaccttgcattttcaagcccatagcactagtgagagatatcatggcacattttaccaagtgccagtattaaagtagcacagaatcacacagcagcataccaactccagaaaaatggcattaaaaaataaatcaagttactctctacataagcacgtttggtgctgtttgaaggaactctgcgacataatgatctgaaagagaaaaaccacttccaaatccaactgtgttctatgtgcagatttaaaaacactagtattctagactaggatgcaaactctaattaaacctttgctattgctcttggcttctgacctcatggcaggcttgcagggcaggtacatagctagtgctgagctctgtggaggaggggaagtgggtgctcagccaagaggagaggcaccttcaggacagctgcccagaagttagtaggcaggagagctggagttaggaaccaaagaagccagctacagaaaatatgatcaaaattgacaactgtatttttcccgaggtcataagctgacatttctatggccaaatgtgcatttccccattctgtgccctagataaagttttattcataatatgtttaaaactggcatcttgtgcacaagacatgacatgttggacaaatgaaggtttgagctgtggtccacagtacccgagggacagtgtcacaaatgatgcaatgccactttgagagtaccattacatttcaagtcaagggaatgtgctttgcaaatgtgggctgtgtgtgtgtgtgtgtgtgtgtgtgtgtgtgtgtgtgtgtgtgtgcctaatgcgttttgaagttaccataattagtaaagaacagcccaggttctcatgggctccttaaataacagagaacgcaaggtacctgtgatcatgctggatataatcaatggcaagatgacaagcttcagcatcctcattagaatttctccaggaaaagcgaagtagaatttatccaggtttgagagctcactgtgtccacgaaccaagactcctatggcgatgcctaagaaaaacagggaagagagaggaaacacttttagttctcttgcatataatttgatgggaaagtactgcagaatgcaaatttcaatggcaagaaaagctgtttagaccatctcttgcaaatctataaagtttagactcagaaaatccagaaggtagtgaataggaagcatgcatttaaaaatgtaaaaaataatattctccacatgaaagattttgttttcctttcctcctcattggttctatacatattgattattacatcattgactattagtttatcagcccttttccccttttcccctcccctaagaatgccttgattcgaaaggttggttggttcccatggcaaccaaacacatcctcaagataggagggcccctcattaatctcaataaactaggattttacatgtccaacagccctggacccttaccttatgtgctgaagtttcagtaacctacttgaatctcagtcataaaatattgcatggaaaactccaggaataaataataggttatttataaataatttttaagagaagaaaaaggaacaagaaatgttacagattctctgaaaccttgtcttaagatgtctatgtgaaaactacccgctgtatggaggcccaatttaacaatgactttgatcactaagacttataaaatattaacattttcttattatcttattccaactacttcaaataacatctaactgttctgtcttgcctttcccccaaaacacatacctttttttaaaatcaagaaataaatgagttagatgactgtcatatctttcttcctgtgtgtgacatgttagcctgacaagcgacatgttagctggaggggaaaaatgattaaatcacagcaagattcaaagaggatgtcactgaatatgcaaattcagaaactcaaatagtttaggaaaagtcatttgggcacagggcaataaaaagggagctgaattataatgaacaatacaatcttcactcaaaagcatgtatccatccttcgccctcctctagtggatgaaccacacaagatattgaagaaccttagcctttacctaaattctactcttctatatattttgccttgacacatattgatacttagataattcccaaaatgtggctataaaaaaagaagaactgtattatcaatccaacgtacttcctatgttaaaaacaagtgctggagactcatgaataggtaagataccaagtattcaaaatattttaaataaatttaaaaggcatgacattttcatttcttgctttgtgaattgcctgtcttcaactgtttcatggaatgtcaaccggttgcttctggtaaattttggacttttatgaaaaaggaatcttggtctataaaaataaaggtgtctgtactcagaaccaataacaacagcagccacagaattgttccattgagcagcaaaccctacatgctcaactttcacacttacattaacaatgaacaagaactatgcccagaatcatctccaacccatatgggtgcaggctggctaggaaacactgtattagtttttcagtctttagccagataaggatttttatgggagaaacaaaagagctgctatgtggaatagttgaaaataatgcatgatgaataaatgcgttacatttgttaactatgatttctatcaagttgaatgccacagtaccctaatagttttcctttagttgcaaagactagaaatgccaaccaagccctaaggaagtagtcagaggttcacaactagcaccctggcatcctgacctaaaagggtctggtgaataaccttggccaagggttacagcttagaagtgggtgtgctttactaatttcaagaaaatttggaaacatcagattcaagataatggcaacaactcaagggtttcacaaggtctacactaactacagatgtcttttcaaggcaatgatgtcagctgtaagagaaactcagaaatccctgggacaacttgattctggcaatctatgaagtataaagctagagcattagagcataagaagaaaggcatcttctgcactcatgtacaaaactaatgaaaagttctagactcaacacagctgagagcaatacttgcctctccctttgtttaccaagcaacctggtcagtgctggcttccagttactcaggagcaatactttcaatgaagcgttgcctatctggtttctgatgtttggcttctttcttatttactgtttccatgccaacaaatgctgtggaataatcctctgtacactgtggctatgtgttactatcattggttaataaagaagctgattggcctacagcaagtcaggataaagttatgcaggacaatcaaactgaggatactgggatgaagaggggtgaagtaagagtcgccagcagacacagagaaggcaaaatgggtacactatactgagaaaaggtaccaagccacgtggcaaagcattgataaaaaaaaatgggataagtgtaacagttagttagtaacaagcctgagctacagaccaagcatttgtagttaatattgagtctctgtgttggttatttgggaagtggccacagcacaggaaaactctgcctacaaacaagtgtccacatctggtatcaggaaccttgggctgtgtgaaggtgcacagtctccaaagccagagggtgctgtgaggaacttctaacctggaggtgaacagccaagttcaccggggtggcgggggggggggagagttccccaactaggaagggggaagatgaatgacctctctaacgagagaggactttggccaggccaaccgaaatcctccaagacgcagtcattaactccacacaagctgccctagaaatggacacattcatcattgtgggtcttccttcccaaccatctgcaagatgatccctaagcaggttcagaggggggaagaatactggtaacagttgaaggaactttaacttctttaacttaactagtcccctacgctggggcaaaacttaatgttaactggctccaaagagcccttctactgcccaggaggctggatttcactctagccttggttctctcaccttaaaataggatgacagaatgtcagatgaaacctgcccatgccttctccagttcttatgctaacacacacacacacacacacacacacacacacacacacacacacacacacacacacgtaacagagaagaaacacaggaagaaaccaatctaagattcttaaatttgaagactcaagtttaaaagagaagattcagggaatgctaccatttaatgttccattttctggacaaatgatgaaacaaaaaaaggggggtgcagctagcatcagctcagcctattgttccccctcttccaatttcaggcatttatactttccatagttacaaaacaaacctgggatagaagctgaattgcattgggctcagacctagaaatccaacagcattccctttgggaggtttaataaaaagtattcaaaaacatgcctgcccatacctgtaatagttgaaatagttagtacattttaaaacatagttcacacagatatataaacttgctaccattttttcctaaagtacatgcacctagattttgtgcagttgtgtcctgagtgtctatgacaattgttttcatatgttgtttatgtcaaaataattatttttaaacaagctgggaccacttctgttatttttaaaaagatttatttttgttacatgctaaaattattttttggcatgcccaattaaaatacacatgcagactaacaaatctaagtattgacatattaaaagacctaattcggaacactatcttattaatgtgagtatgctaagcatcttaagacctactaaaatgatatctttggttatatgaaatgcttcataaaaatttaaaatgttggctagagtgatggctcagcagttaagagcactggctgctcttccagaggtcctgagttcaattcccagcaaccacatgatgactcacaaccatctgtaatgagatctggtgccctcttctaacctgcaggcatacatgcaaacacaacgctgcatacataataagtaaatctttttaaaaaagcttaaaatgctaattgtttacataaaacaatattcattaaccataagatttgattaagctataaaatttaatgttatatacatggattttaataaagatttaaatatgtatatatattacatatatatacatctcatttgcatctcataaaataggtagcataaaaatcctgatttcttttttcaaaatatttttaatataaagcttaattatagaatcttgaaatttgcaggaaaatggatggaactagaagaaaccattctgagcgaggtaacccaatcacaaaaagacaaacatggtatgtactcactcatacatggattttagacatagagtaaaggattaccagcctacaatccacactgtcagagaagctaataaacaaggaggaccctaagagagacatctatggtcccctggagaaggggaaagggtcaagatctgctgagcaaattgggagcatggggagagggagagggagctagaatgagaaggggagaagaggagggctgaggaggaaatgagggagcagaaaggttgagtcagggcaagaatagaagataacaagaatggagataccataatagaggatgacattttaggtttacagagaaatcagacactagggaaatgtctggagatgtacaaagatgacaccagctaacaatctaagcaacagagaagaggctaccttaaatgccctcccctgataatgagattgatgactgacttatatgctacccaatagccctcatccagtagctggtagaagtagaagctgacacacacaactaatcactgaactgaactggaatccagatgcagagaaggacaagtgaagagcaaaggggtccagaccaggctggtgaaacccacagaaacagctgacctgaacatcggagaactattgctccccagactgatagctgggataccagcatgggactgaaccagaccccaggaacatggatttcagtgaggaaacctcgaaaatctatgggacatcctgtagaagttcagtgcttatccctagcacaggtgtggactgtgggagcccattccacatagagggatactccctgagccaagacacatgggggtgggcctaggccctatcccaaaggatacggtagactctgatgaccccctatggaaggcctcaccatccagggggaacagaaaggatttgtgataggtagggttttagttgggaggggggcggtggtaggggaggacgggagggagaagggaactgggattgtcatgtaaaacaatcttgtttctaattcaaactttaaaaaaatctgagaaaaaaatataaagcttaattataaggtttatttactaaagctggactgtatgcaacttaacggatatatgtttactgaagatccttgtgttaagtctccttttcatggagaggactacaggaaatataatcccaataaataatagcattcaaactattggtttataaactctatcttatttatgattatgcacatgtgattatgattttattgttgttttacatcatgtactcagtgccaaatttgcttgtaaataaatgtttatataaatttaagttattaacttggcacagcttccttttggctctgtgtccaaatcctggtctcaccaccttatgagttatattatcttggccaaaattaccttaacctgctgcctgcacctcacctgtaacaatgggcttattagactgtcaactttagaaagtcattagtagcacgacaagaccatctgtaatgagtgaaaagtaatgtaactgtctgaaaagcactggctcacagagtaaatagaagtaacgcatattgactaatatgtcttacgcattcttcagggagtttctcatgagatcttcaaagacagttatggctctgacaggtgtcatggccacagacctcaaaagcaacagaactagggttaagagaagtcaatgtaagatattttcagtgtgtctaaattcacaaggtcatttgtttaacctatcccaattatttgaacagaaaaacatttacttttggccctttcattaaaaaaatccagaattgaaatcaggatacataaaagctctatgaagtcactgagtgtgacataattcctgtaccactggctgtccctgaaataaaattatcagaatcttgttgagaacagaagaaaagtcacctgatatgtttttggtgtcttctgaaatacttctctttgtagttcaaagacctaactaaatcctgtcactgtttactgtgttcggtatctgttttaggccccagcatgggtgtaaagacatgtaaagcatggttgacacacacctcttccttaaggagctccagtcggtgaggaccaatctcaattgtaaaccagcagagtggggttcttatggaactgtggacaactctgagaaaactccatgccagttggtcgagattatttttactcgcccagaaacgaaaagaaactagagtcagaattaagattgtaccaagaatatcctagaccaaatccatggaagctatggaaaatgacgaggatgactcagatggtattgactgaaccatgtgaagtacacagaaggaggggagcagggcataaatctatgcacaagtatgaagacttgagttcaaatcctagctcccacataaaagctgggtgtggccacgtgagcctgtaatgccacacagcagtccacctgccagccagttccatattccttttctcaaaggaatgatgacaattgatacagcaagatacctgatgtcctcctctgcctctgtccaggtaccatcacacacacacacacacacacacacacacacacacacacacacacacacacacacacgcacgcacaaaaagctctaatgctcagactttgatgtatgtataaatcacctggggatcttgtaaaaaggaaggtccaaatttagtaggaccaaagatggagtagcagagatgtacgtcagcctagctaggacatccattagggacatcctcaccagtactgatatactggcataaacccacaccaacagaacagaaagatgaggaagtgaatgtggcttagtcaacatgcaaacaagctgacttgtccctttagaaaggtctcgaacaaagtagtatctttgcccactcttttccccctcttggcttccatcatcatcagctgcagtctgttcttccctattctgcctccctccatgtggggctctgggcttctctgcatgaggtagtgttgagatgacagtggaaactgggtgaaggaaagggtgaccaccactatctgcctcaatgcttctagtcacagcacctccaacgggcaagcttgtatcgacaagaactgtcctataaacattctttcctgcatctctgaagcggaaacagtgtctccctcctacccagactgaaagtgtgataactatgtggatcccgtttgacctatagcagccatcttgagttataactgccatgatgtcctgagtcatctggttagtttcccatcagtctgcaaataacaaagtcattagtgtggtatgtggagtttacaccagactctggagttaccgtgccaagaatgtgtctggtttcactgatagtagcttgagacaattcagtaacattcagctccgatgaagtcactttactactcaattcgaagggatcccctcctcctgcagtgccgatagctatgtttatgtcagcgagtctgcaatcctgagtcttctagtcttaattgctctcagtttacctgtggctggatcacacatcagggccaggatttgccagactaggaacccataacttctgccacagcatgtatactcagcattgataccacctgccaccatggaagaggggactgcagccttcctcaaggcagtggtgggaaggattggtgcaagacctccacagtgaaaccctctacaaacgcagatcttcattcttgccccaattcctattttcaagcatgaattctgttggccttccaaaagttaacaggtaaagacatggtaggactttggcttcacatggtgacaaaatagaaacattctgaaaagttttatatttttaagtgactcagcaaaggcagacatgcaaatcatggacctgataaagacttagcaatgtagaaaacaatatttaaaagtcaaaaataaaaagacaatcacatttctctgggtcctggtgcagctgctccagtcacaagggatgggcagcagttattagcctacagagcttgtggggttattcatgatgagtttagcccctcagtccccaaccttttcttcagtggacaggaaaaccagtgataaaacttaaatgaggaatacaatatgtatatggctacatgaaagtgcagcttgcaaataccaaataatacatagatggggcactgtctggaaatatgggtggagttttactaaggcataataatgtcctttataccggaggcattgaagaagctgaggaatatatatatatgtttttctacacaataaaaatttgttttcttaggaaggatgcagaggtcatgaggaagcagaaagtcaggtgtagattagaagaaaggacatatgataggtaggattttagttgggggggtggtagaggaggaagggatggagaagggaactgggatcgtcatgtaattcaatcttgtttgtaattcaaatatataaaaaataaaatcaaaaaagaagaaatttgttttctttttaaaaagaagacaatccacttgaaatcaagcaaatatttttgaattgccatttctccatataagatacaaaatgaccaacaggtacatgaagagaaatgattagttatgagtaaatcaaaatcacaagatgctattttatactcattgggttgttcatattaaaacaacaacaataacaaactcgagttagaaaatgtggaaggatatggggaaactggagtccttccatactgtgggtgggaatgtggagtggtgcagactttgggggacactgacagttctttaaaaagttcatcagttaccatataaaccagtaagtaaactcttgggtgtgtaagatgtatacccaagaagacaaaagacatccaaacagagccccgcagaaaatgtcatagcaatagtagcaataatagcagtaataatagctgaaaaggggaagcaatctgagtgtccatcaacttctaaacaaagtaagacgtatctgcacaggggaatgctattcagccataagaagctataaagcactgactggcacacatcccagcctggctcagttctgaaagtcttatataaagaaagaaggcaaacgtataagcttttactatgtgacttcatcaatgtaaaagtgtccagaatagacaaaccagaggcagacagtagaatgcgcattgccatgggtgaggagaggactggcactgacaacaggtacggggtttcttttgatagcatggctgggaataggaaattagacaatgataatgtctgtcctaaataaaccatatacagaaaaaaccattgaactgtatacataagtggtaacttatgtgaattacattcaattaaaaggacacaatgcacagacatgcacgtaaatgattacttcataaaaggcttaggttttaacacttctagataaatgaacaaatttattaaaatggaaaaaaaaagagccagatggtggtggtgcatgcctttaatcccagcacttgggaggcagaggcaggtggatctctgtgagctcgaggtcagcctgatctacagagggagttccaggatagctagggctacacagaaaaaccctgtctcaaaaaagtgtgtgtgtgtgtgtgtgtgtgtgtgtgtgtgtgtgtgtgtgtgtgtgtgtgtaagcagatactaacactgagtgtgatccatttacattttgattggttaacaatttgatggtttttcctggggtgggagggatcgcagcaacacaagggagcttgtttattctcatcgtcatattaatggcacaatgactgccaaagctgtggcattttgttccacttggtaggctgtatgagaccttatcagatttgagcgtctcaccatctggaaataatagtttgaaaccctgattgaagccagacatgtttattaacagtttaaaaggagactcatcggtttaagaaaacgtgtgattcaggggagggcctaggccctatcccaaaggatatgacagactctgaagaccccctatggaagatctcactctccctgtggagcacaaagggtatgggataggtagagtgttagctggggaggggcaggggagaagggcagggagagggaacggggtttgacatgtaaaacaatcttgtttctaatttaaattaaaaaatggaggaaaaaagagaaaacgtgattatagattgtggttcataactagcaaaggtagtgtttgagagattcgttttcacttgcacagtataaaaatgaatcaaaatgaacaatagaaatcccggattattgtaagaagaatgttaactgcagaacactgaaagaaaaacaatcaaaacaaatgatgcaaaaaaattcatctcccattagtgaaagagtggcttgtgtgcctgttacttgcaaccattttgctaagctttgtggagaccacaaggccctggttcctacacggtttacagcctcagtaggtctggcttattttattttatgttttcctgcatgcatagctggtgcccacagaggccagaagagggtgttagatcccctagaattggagttgtgagctactatgtaggtactaagaaccaaacctggatctcgcataagagcagccagtgctcttagccactgagtcatttctccagtcattattgcaaggcatttccaggagtttttcagtcctggagctgagtcctccctttcagtttctagtagtgtgactataagctacttaacctcttatataagtgagcgtagcatccttatcagttaaaggagcatccttatcagttaaaggagccatttggtcacttggctattgtgagcactaaatggcataacgaaggcaaaactcagcccttcccctgggccagaagagagttccatcagaatttgccatgactgaaaagtgacaggaggcaacaataacgacagcaaaagtagacagaagagcatttccaaaacactgtagtccctggtacaaatatacacagagtcagatgctgggaagagaatcaaagatctgagttttaattccacttctatcaccacgctttgtcattaaatccttttgcttttggttgctttatctgaaactgcaacaaagctatttaagaaagatgaaaacagaaggagaaaaagcatataagaagcacttttcgttctaagtcaatgttgtccactattcatattttagaacatacagatcttttacagtcattcttacttcccagaaaaccacttaaattatagagatattttgggtgtaaaaattggaggcctaaaaacatttcccagaggatggcagaacaaaaatttccattgagagaaggaagaaatccaacttccgtttatttcagctcagctcacaacattctgcagactaacaaaaatatgtgcaaggaccaggcttagagactaggcagagagatgcagaagaccccaaagcaggcaggaaagcaggcaaccatgggataaagtataagggcaaacatgggataaaaacataagagcaaacatgtataagggcacacaatttggcccaaattctactattgttatgtttcctggcttcagaaagaaggtaaatggcagcctacttgcatctttatcatgccacaggtcaggaaggactgtcacctgacccagagacaggttgaacactagaggttgataagagataaagtcaggaactccccttttctgtctttcctgtcacatttgtccttctcctcaaggaaagtagaagcccatgctggaagtgataatggaagcagggttattgtacagctactgatggctcctctatctgcaagaagccacagacacgacattggcagatggctggagttggaaggactgaggtctcctccacaacagactctaagcaaagaggtctgcagatggctgccagagaaatggtgagcatgaaacagcagaaccttctgctgctccaggaaatcacactccctgggtcatctgtcctaggccccaacagttagctgagccacttttctacatacagccctttcaattcccaacaccgaatagcatgcaagcctcctgcttaccccagactctcctccaaccttgccccactgtttcagttctgcccatggcactgggcctttgctcattgccccttctgctctcctggatgccatgtcagctactataaaacccaataggtgggtgtttggaaaaccttctcaacctcctcataataactatactctcccaattgaaacacgtcttagaaagaggagggacagccgggcgttggtggtgcaagcctttaatcccagcactcgggaggcagaggcaggtggatcgctgtgagttcgaggccagcctggtctccagagcgagtgccaggacaggctccaaagctacacagagaaaccctgtttcgaaaaaccaaaaaaagaaaaaaaaaagaaaaagaagaaaagaaagaaagaggagggacgttcataaaattcaaggtgctagccaagtggtgatggtgcacacctttaatcccagcacttgggaggcagaggcaggaggtcatccttggttacaaagttcgttccaggacatccagggctacacagagaaaccttgactcaaaaaacaacaacaaaataaataaataaataacaaaaataggaaaaatttcaggaagcagaagaaatttacaaagcccaggaagaccacgaaatgtacagagatttagaaagctcagaatgcccccccctaagtttatataaccaatagacaatagaaaaggagactttgctgtagctgcctgtcagtggttcggggaactcccgggatgtagttctcaatgatgtccttgtctttttgagaatatcacatagatggtatcatataaactgtaatttgctttttcacttactaattgaaggatatttgagaagttttctattttgagtaattatgaatagggctgcccgtcaatatttacgggctggttttgacatgactataaatatttctttctctaggttctgtatctgaaagtgggatttggggtacaatacgggttaagtttataaaaacccactcaagtgtgttcagagcggccctagcaatgtgtaggagttctgcttgttccaccttctcattaacacttggtgctttatgttttattttagacattctaataggtatttggcaagaccttaaggttgtaattttcatttccctggtggatctgatgctaaaaatatttacatgcctttattttcctttgttacatagtcttcagtgaagtaactgtctacctagaagttgggtagtttgtctgcctactattgagttctggaagttctctatatattctcgatataactgtagatgtattggagaggtgtcctccaatagagtaaggattaccacctactctacagcttattttttgtctttcataaagatttattttttttaaagtggaacgtcattttttctttgaagaactgtattttggtgtttaagtctctttgccaaactgcaggctatggacatttatcttctatattttttccttaaagttttatattttgttcttttcctttatatctgtgacccatttggacttagtgggcgattattattatttattattgcaaaacgtattgtttggactgagggtctttttttcctcctataatgtccagctattccaataacacctactgaaaagaatacccttctttgaatgtaccgttgtcaagtatcagctgggcacagtagtacaagtttatttctggaatcacttttctgtttcaccgatctgtgtctagcctttcattattgttttactggttcaactaattatcgtgttggaataataatgtggttccccaattttcttcttattttccaaaattattttaggtctcattcctttgactttagcataaatcttagaaccagtttatctgacgtatctgaataaagtcctggtgatgttctgatcaaaattatattagacctataacccagttgctggagaactgacacctctattgtttggagtcatccagtccatgaacgagtgtgggtctccttttaaccaaggattttgatttcttccatcactgttctattgttcaacctaacgctccccattctgcaaaagaaatgactttaactgcacggtatttttagcacatggattttatagagtcagctgggtgtccagtcttgcactacctgcctgcctctgtgtctgtttgtctgtctatgccttgcatttctttttccgccctatggcagtgtgtaaggcttccactgagacactgagtagatgcaagaatgaacatcattgtcttattcttacttctaggacaaaagcaataagagtttccccgaagacatattagtgctatggtattttttaatgtggaatttttagtcatagtatgttttaatgtgaggaatttttagctatagtattttttaatgtgagaaatttttagagttaaacttccattatagtcattgcttacttttctttttcttctgttatggtctgactgtttatgttactgtaaatttggtgtgctgaaaagctaatcaccaatgtgaccacgcaggaggaaaggcctttggaaggtggtcaggccattggaggagatactcatgaatgggatccatgttcttatgaggaaggccctggagagctgtcttttcccttctaccacacaagaacacaagtagaaggtgccatccatgaaccagaaaatgagtccaacaccagacaccaaatcaattgctagagctatgaggggcaaatttgtttatgttactcagttgtaacatttgttattacagcctgaatgctttaagacttgttctctcatactttactgtagtttctgtccaaatttagtcaagtttaaactatgtgctaccatagtttcaataatcccacccaaactcttgtatgtttaattgatccttattctgaggagctaaagagacaagccctaagaagcaattgggccattagaacccagccctcaagaactaatccattcatggatcaggggttaatccagtcattttcaatcttcctaattctgtgaccatttaatacagttcctcatattgtgttgacgctctaactataaaattatttttgttgccacttcataactgcaattttgctactgctatgaatcataatgtaaatatttgtgtttttcagtgatctttggccagcctgtgaaagagtcattcaacaaccaaaggggccacgacccacaagttgagaaccactgagtcaatggtttattgtgaaaatgaatctgttataaacacttgtttgggtctgtctcttatgaccatctttcttgccatattatgccagtgccaacttgagattctgaagaaatttccaatgagcaagaacagccttgctctgggtgttggtggtgcatgcctttaatcccagcactcaggaggcagaggtagacagatctctgtgagttcgagaccagccaggtctacagagtgagttccagggcaacctctaaacaatacagagaaccatgtctcaaaaaaaaaaaacccaaaaaaccaaaaaaaaaaaaaaaaaaagaacagccttgcagaagcagctcctaactcttaaaccttggaatttacagcctccagaaaaatatgcagaatgaagctttgtttattagtcacctagtctctgggaaaaattagattaagatggagttaaaatgactaaacagtaacttcaatggcttttctgacattatgaattcagcaggatttaacttacaagtgtctactaatcataccaggcaatagtctaggtacacagcagatagaagtcaaggtttttgtggacgttaccactcagtagctatggttttgtctattaatattacatcttctacttttcttatgcaccaatagcaaaatccctgaaaaatgaattgagaaagaaaattcacttccaatagcttaaaataatctaggcatagtggtacactcctttaattccagcatggggaggcagaggcatgaggacttctgaattccaggccaggtctacagagtgacctccaggacagacaaggctacatagagaatccttgtctcgaaacaaacaaacaaacaaatataaaaataaacttaaccaagaaggtaaaggacctctatggtaaaaaaccaaaacactgaagaaagaagtcaatgaagaccctagaaaattgaaagacctcccatgcttatgaattggcacatttaatattttaaaaatattactgaatgatgtgcatgttcaatgcaatccctataaaaatcctaatgtcactcttcacataatagaacaaagcaatccgaagcaaaagaaccatgctgggaggtatcacaatgtctgattcccaaatatactacagagccatagtgacgtggccagcatggtggtggcacaaaaccagatatgcagaccaatggtgttgggcctcagaaataaacctacactgttacagctatgtggttcctgacgaaggtttcaaaaacatgttggagaaaagagaacttctttaataaatagtgctggggaacctggagaaccattaaaactggacacctacctcttaccctgtgaaaaaatcaattcaaaatggttcaaagacctcaatgcaagacctgaaacttcaaaattgctagaggaaaattacaggtgaaagtgttcaagacatggaaggagtttctggaaaggactctagcagctaaggtaacaataacaagagctgacaatcagattaaaccaaactaaaaggcttctgtgcagccaaaggaacaataactagagtaaacaataggagaaaaatttaacctgacaggggattgatacctacaactcaaaataattagatatcaaaagatccaaacaatagaatcaacaaataggcaactgagttggctagatacagttctcaaaaacatataaatatatatgactaataatatatgaaaaagtcttcatctttaactatagggaaaatgtccatcaaaactacattgagagtccatttcaccatactcataatggctatcaacagaaaaacataaagtatagtgacagctatatattaacatgccacaatgaaacccaagacagaaaacaaaacctcatacactattggtgggaatgtaaattggtgcagccactctggaaaccagtatgaggtccttcaaagagctgaaaatagagcaacttcatgattcagccgcaccacctctgggtatatgcctgaaggagtcaaacttaactcagtcctgctgatcgtgacatcattcccagtggtcgcactatggaatcgacctacgtgcctgtcagtggatgaatggacaatgctgcatatatacactcagaggagtgcatatgaagaatgctcatgccattggcaggaaaacagacagaactggagcaaagcaagtcagactcaaacaagtattgcatgtttctttttccatatgtagaaactaggaaaaaccaaacaaaacaaaaccaagaccaaagacacgtgagtgaatgtgaaatactaggcaagaggtgaggggacaggaaaggaggaagggaaaagaggggcgagagtggtcaaaacatgtgatgtgcatgaactaaactgtcgagatgaaatccattatcttatataactagtatatgttacaaaaacaggaaatgtgaaacaacaacaaccggtactggcacacctcctaactcaatcagttccaggtgcggccagctccgcagctactggagaagtttgggggacagtggaggatgaaggagtgactccatcaggccaattctttttgtctcaggacctagttgaggaatgcatccatgacctaattagggtggagagcctaggatgtgttgtctgagcctaccagaatcagaacctctctctcactgttcttttccctgcagaacagggaaagggaaccgctgaatactgggaactagcttgctaaccaggggaatcttgtgctcgctgcaaacaacccaggaatgcagagatgcacaggggacttgcaaggaaggaaggggtccagatgatatggtttcagtcccagcacaagctatacctgaagctagctaggtactatatttttggctgcctaagttacagaagccataaaatctcgaactgtcctcgttttctgacttaaacctgtttggactggaagtgccttcctggcacttccaattaagaatcctaaattacagggggggaagcaattgagaaggtgtctgtggttctctgggtaactcctccgccaaacacatatgccctagctgctagtgatgtgggtgcaaggcctttcagatagggtgccaagaagtttgtggggcaggccaagggaacgaaagtggccatgttggtattgagctacagaatggtggaagccattattatctcacctcctacagtggccattagggacagccactagttatcaccaccagttattataacttcctggccactcatggactttccgtctctcttcaatgcttatttcttttaaataatggtatcctgaaaatgcttcagtatggcacctggtgccacttgcttcggtgtggcttagtctccacttaagtgtcttgcaggctcactctcggcccctctttgacctgctctgtgtgccggccaactaacccatggttccttgccctctggttttggctggatgaagtcaaggaacaatactagctgtagatcttgagggtggaaccaagaatggaaattattttctccttgatagggttccggtggcagctctgtgtgcgtgtgcgtgcgtgcgtgtgtgtgcgctcgacagtgtttccctgtacaacaacagctctgacatgctggaacttgctttgtagaccaggtgactttgtttctggagggctataaaagccctgtcatttgttccctctaccatagcctcagcccttctaagactgtgctagcactgcctgttcaggccccgggagattacagagtgccacagctggttggttcctgggacctcccagccttcctagtccctgtaaccttgtctaactctataatagctctgggatgggattctgtttggtgaatcttgtctgagtaaatgtgccgtcagtttcttgccaggcccctaactgtagcagctcacattcccgaccccagtctccacatttccagtcaccacgaactccctgatgcttcttaaagatgctccacagaactttcttccacacccctgttcatgaacacactcctcgtcggaaaacttttatcctatctctgactcaagacatcttcccattcctactgaaactgccaccttttccatgaagcctttctcaggcctgtctctgagctgcagagtctcactggcccttactgagtcttttctgcattagttaccctctctgagcagcccctgtctatcccaagctggaggctgaagcactgtgcccactgccggccactgacacctgcaacactgaactgaaccagcaatgctttagaatcactacttgatgcgcatgcccaggcagctactgcctcgtccacctggcatgcatcgaacctgatcatgacaggcaaaaggaaacagttgggaagagcccattaaaagaaagctaagtcatgggggcaagtacggggggcggggggggggagataaattctgccattttcccatggaaatcacactctgacctgcatcttaaatgtgaccagtgcagcaaccctgactcatgaactggctctcccttgactatggccatgatgctgtaagcatggagttcagggatgagttcctacacctggaggcttctcccagacttctggggccctggataggacccaggtaactgtaagagtccaggataagcatggcttaagtaactccagagttctagatgagggacaagccagttctgtggctactgacttaagaagttaaaaagaacaaccagccctaacaatcctgaccactctaaccaatgtaagcaacaagtgaatgggattactggaaattattaatatctaatgtaggcaacaagctgattccagaggagactcagatatgttttgcaggttttgtagctcctccaaagaattcagaacctctgcagtctagtgaaatctcaggaattctccattggctgtggtggtgcacacctttagtccctgcactatgaggagaggcaggtggatttctgtgagttcgaggccagcgtggactacatggtgagtttcacgacagtcaaggctacatagtgagaccctatctcaaatgaatgaatgaatgaatgaatgaatgaatgaatgaataaagctccccccagttccccccaaagacacccagaaaggaatccatggacaggaagcagaagtggaaccagcctgttacatttcctggttggtaattaacttctatcaataagaaaaaccaaaacaaaacaaaaaaccaacccaaaccctcaatctccgagtctttaacacagtggttctcaaccttcctaatacctcgaccctttaatacagttcctcatgctgttgtgaccccaaccataaaattatttcatggctacaactgcaattttgctactgtcactatgtatgaacccttaatgtaaatatctgatatgcgacccccatgggctgagaaacactgctttaatgactaaggctaatgctgcaacagtttgttcaaggtcagctgtaacacacaacccaggcaggcaaattaacctattatcatagaaattacctccaaactgagagaaaggggacgaggacaagagcagaaggactcttggagaggggaacctggatataaattcactttaaggtgtagaagcagctgacccttgcttttgaaaggtctctatgcatctgcagctgctccagccctaagttgagacccacttattgaaaggcagagaaataatccgcttttctccagaaagcaggctggttcttgctctgacttcaccctgtggtggtggtggagagcatatgcgcactgacagggactcttccgcgattcccattccaccccatgccagacatcactaaatggtgacaatgctctttactactgaggtctgccatgaccccagcatccttgaaactgtgctgttgacagctccagccatactgagctctcaccacagtggttgcagagctgttagcaattgatttttccctggaacctttaaactaggacctagaaaactagaacatggggaacagtgtcctccaccactctctaaaatctcactcaagtgtgtggataataaaggaccaatggaatagactcatcaagggcttacatgtttcactctttgataaaggttttgtaatgcatcaaaaaaaaaaacattttttgagcatctcttatccgaatgacacgttcattaatgacctcattcctagtccctccgcagatggaggtgagaaatgggacggtacatattgctatgggctggatatgctctgtcccctctgaagctcattgctgtaatggcagtgttaggaggaggggcctatgaagagtgagtacaccactaacagaagatcaatcatccctttctccctgtgtgttctcactctcttagctactgcaggagcaggctattatgagctgaggccatttcctctatttcagtggtccttgaccttcctaacgctgccctgaccctttaacacaatttctcatgatgaggtgacccccaaccataacattattttgttgctgtttcataactgtaattttgctactgtcatgactcggaatgtaaatatctgctatgcaggatggtcttaggtgacccccgagaaagggctgttgcaccccaacggggtagtgacccacaggttgagaaccactgctctctttcatttcttcagacacacctgtttatcctgcttttctatcatgagctgacatgcacctcacagccctgtgcacttggacttctcaggttccagggctttgcactcaaataaacttattttttaacacatttttttttaattttacagcaactgaaacagaataaaacaaatgtagttccacacaatttgaaaattaaatgtgaaaaacgaaggcctctgactttgacttgaaacttttacctgaccttgctattgctaaaactccagcacacctgcctacctctgctcacagccactgtctctgtggctctgctaaaaaccccttctccaattccagttctcctttgaagtcaaggaatgtgggagcatccttccagaaccaccttacagaggctcatgtgagcgatgcttgcccatatattgctattaacagactgaagcaatctatcacagacatccaactctgcatctcttgacagcaaggtccattcttgtacaatttaaattgctttcctcgttggctgctaaatgaatagatttttcctagccacagacctcaattttcatctcatatgccgattctgtttgattaacagtgactgcctggaacatagtttaaagtccccaagtggaaggggttgtcatcaattagtgatgtctgccacagggtaggctaaggtgcgatggtgtgaatgctgagtgcttgtgaatataaatttggggctgcaagggtttgaagagggagatgacctctgactgagcaatcagatgagtctatatggtaaacataggaattagagccatcgtcaacagacaggataatgatagaagaaacatctgggcatcaatgtcacaaagtacaacccaccctgagagagtactagctaagttcacttaagatataacgtaggcagtttatgtaggagaaatgttgtgaaataatctttttgttcactgtgaagaagtatcactcatattggtttaatgaaaagctaaatggccaatagctggacaggattttccaggcagagagaatgctgggaagaagaagaacggagtcaggagtagactccaaagatggacaggaaagcagcatgggcaatatagagtaatggcaataaagccacaaggcaaaaagtaaattgatagaaatgggttaatttaagttataagtgttagtgacagagacgcctaggctaccagccaagctttaataattaataagtctctgtgtggttatttgggagctggcaggtaggacagcaaaacctgtttacagagaaaggactaagcagtataagcagtatggaatactctaaggacaaggtgaagaagagcccagagacagagcagggagaaaccaagagaaagttcaaggtcctttagtgcttttgtaagaaagaggtctgttacagtgtccttaattactaattaggcacatctgggttccctcaaagggaagaaaccttgcttaatggctaacttgaacttttgaatcagacagtcccgagtttgcacctttgttcttacccccatgacccaagtttctgtttcttcatcccacaaaggatgctccctcaatgtactaaccacactggcagcaaatgaaatccacaggaactcccctgtaaatattagcatcactttgctcagctacagacaaaactcagaggagatgtctctgaaagcctcacaaccccaggaatcctatatgaaaccctcaggatgcctaagtggctcagaatataattatatgagacatgcctagaaactgggttcatttttctaggagtgtggagaggcaggaggtcgggcttcctgcagctggccatttccggtgagggtgcgtacctttggccatcgttcttggcttagagctttgctgaattataagtaaccaaataacttccaggcggtagcacagtaatagaaaaataattcgactcacccaggctctctcccctgacgaacgattttccccttggctgaatacatgctatagttttaagcagctgaacactgaacccagatggctctctcggcagttataagaacaaacatactgtgtggatcatctctggtgtggttttctagctccactccccacagtcaccattttagcccaacacggaggccaagatcacaagaagatggtgtcaagacccttccttgacacatagagctctgtgatgaacattgtcatgcctctggacctggggactatgggtgtaatgggggcccaggagccaaggcttcaggctaagcagagttctgctggcgggccttactgctcagtgctggttcaggtgaacctaaacaccctgttcccatctgggctgactacagaggtgtcactgttgagtgtgctagtgacaacagagcactctgtcacattaaggctgttccctcagccagttgacacactccttttggggttacatgccttgctaaacccagggctctggagaaaattgtgggttcacagtaactgtctccaatgctgtcttctattagatgcacgttcatttgtattttccaaggaaaataaaaaggcatttaaagcacttgccactttagcagacaccactgcagggttaaatggtacttgatgttgtctataagtctgtagcaagcacatttccttctaagtgcttgagactccacaaagtggcctttggtctccagtgacactgggaagatttgcagctccttaggcaagcaggactctggcacccggccagtatgctgctactctctctaggacagtaatttttaggctcagctcggttaaaggtaatcacagtttctcacaagtaattaatatggaacactttatctatatgagcaggagtgcttgtgtgtacatgtactctctctctctctctctctctctctctctctctctctctctctctctctctctctctctctccatggaatactttatctatatgagcaggagcacatgtagatacatattctctctctctctctctctctctctctctctctctctctctctctctctccatagctgattcttaatcctacttcctacaccttcctagacttttcacccaccttaggtatattctttgactgtcagcatatactgcatcaatacacagaattttctctacagcgtgtctccatttggagtatcctttatttattatgccaggtgctcaatttttttattctaattacaaacaagattaaattacatgacaatcccagttcccttctccctcccttcctcccctactaccccccaactaaaaccctacctatcacatagcctttcttctaatctacacctgactcaacctttctgctccctcatggcctctgcatccttcctcttcctcccttctcattctagtagctccctcccccctcttcccatgttctcaatttgctcaggggatcctgaccctttccccttctccaggggacaaagtttgtctctcttagggtcctccttgtttactagtttctctggcagtgtggattgcaggctggtaatcccttactctatgtctaaaatccacatatgagtgcaggtgctcaaatttttgaaaggtaactttgattctatagttttgctaagctaaaacaaaaccaaaccaatgacaagccactgtcttttagataaaatagcgtttaacaagatatttaatatgtgtcaaccattagcaatttcaattctcagcattctaaaaaggcagacatttagatgaaaaggatacttgtatgtgcagaacctggtatgtggaatcacttgcaggaatcattctctaatttttgtttaatttgttttagagtttggcctagtagatttgaggtacgaagaacattctagaattagaatcttttccaagatttttccattctcatatgatctgccttcatttcaaactgaaagcagtcacagatatcaaaagccaattttcctttctttttaaagtttctttttaaggttagcatgcaaaccaacaagtatcattgttgcatcttatatatgtacatatcatcctttgttctcactcatcaaccccccctccaccacttaaatgttctctacagtttgttccctttggctttcttaacacaagtcttccattgccctctctattgctaactctctgaagatcacttacatgttcattatctagcttctagttttgtgacttatacacacatacacatatatagtcttatctaggctccatatgtaagagaaaaaatgtttgtctttctgagtccagcttattatgcttaacataaatttctagtttcattcactttcttgcaaatgccataactccatttttgggcctgaataaattccattgcatgcatgtattacattttccaattgatttttgcacagagatagttttattcttttacagtggaaatccagttttctcagtaccacttattaaagtgtttgtcttttctcctatgtatgtttttgacaaattttgtcaaatgctagatggctctaaatgtgtgggttttggagtcttctagactatacagcttatctacatatctgttttgtacaagcaccatgccgttttttttattattttatagttattattatattattatggctttgttatgtaatttgagataggatattttgatacacattccattggaccttctgttaagggttgattaccttggctgtttggggacatttgcacttccgcgtgaattttatggttgttatcctaattctacaaagaatgacactgagattttgatgggattttggtaacatagtcatcttcacaatattaattattccaatttatgtgcatgggaggtttttccatcttcattgtagagaactttcacctcctttgttaggtttatttctagtttttttttgtttgttttttgggtttttgtttttgttttttaaagcttttgagaacaagatttgcctgagttctttcttggcaagttcactattggttctatggtggtttgaataggaatggcccccctatgctgtggaataaccttctgtgcgctgtgtaaattatgccatgattcgtttaataaagaagctgactggccaatagctggacaggataaggttgggtgggaaaaccagactcagaactctgcacagagtcttaagaagggcagagtcaaaggagtctcgagcgagacgaagaatcaggacataaacacgccacgctgaaagaaggtactgccatgtggcaggggtagataggaaatgtgggttaattcaagatgtaagaactagttagtggccgggcggtggtggcgcatgactttagtcccagcactcgggaggcagaggcaggtggatctctgtgagttcgagaccagcctggtctacaagagctagttccatgacagcctccaaagccacagagaaaccctgtctcgaaaaacaaaaaataaaaagaactagttagtaacaaacctaagctactggcatagcatttataattaatattaaatctctgtgttggttatttgggaattggcagatggcaaagaatggttggtctacactcatggactggtgtgttttaatacttatttcatagggagtgacattactaggaggttggggtcggtgtggctctgttggagaaagtgggtcgctaaggggtaggctttgagttctcataaaagttcacttcctgttggctctgtggtcaagatatagagctctcagctccttctccagcagcatgtctgcctgagtgccaccatgcctcctgccatgataataatggactaaacctctgaactattaagccagacccagttaaatgtttttctttgtaagatttgccgctgtcatggtgtctcttcacagtagtagaaaccctaagtaagacagaagtatgagaagctactgggttttggttgttgttctttatttaaattgatttttgtgtcatagtgctttggtcaaagtgcttattagttctaaacattttctgggagtctttatggtattttaagtgcaggatctcatctgtaagtacaacaatttgacgtcttcatttccccatttgtacccctttattccttcttctcatctgattgctctagataagactttgaatgctaaatcaaatgagtggagagagcggcatccttgtctcatttcagatttcaaagcaaatgctctcactttcccctcatttactataatgttgagtaccggttagttgtaatagcctttattacattggtagatgttccttttagtttcttcaaggcttttataatgaagggatgctaaagtttttcaaaggccttttctggcatcaattgaaatgatcatgtaatttctgtccttacgtcttaatgttctgcattacatgcatttcttttgccaatgttagacagtctctaatccctggaaatgaaaccaacttggtcacagtgcacaatcttactatgattttgaatttggtttgcaagattttcccctagatttatatttatggttatcagggaaactggtttatagtttttttctttgtttgtttgttttgtgtatggtataagggagctggctaagtagacagggtatgatagtgcctttctctttctattttatggcagcagtttgaggtctaaagcccagttttcttgtttcagctcttcagtatgtgaaacttagactaagattctttaagcagctattgaggatagatgaggatggatgctagatagacaggtactcaggaagggacaacatagcagtatttcattaacacataagaaagagtatgtgtatatgtatttagctatctataaagtcaatgagacaaatgtaaccaataaactatcaacctcaatacttccagaaaatgtcacaaaaacccattttaataaccactattttgctaatgtcatatctgcagcaaggtgtggattaaatatactattgcaaataaaatgcactcctaaaccagcaactttgtttttcccatttcctaaaaatacataaacagagggggttctatttttcatcaaaagctcaaatgtgtgtggggggagtataagtcctttattacatatgagaaattatatcttttgttttccctacaccaattattgattgtatgccacagaaattagtgatttgaggatacagaaccaagctattctatcactttaaagaaagaccagataagccgggtggtggtggcatctgcctttaatcccagcactccagacatagaggcaggcagatctctgtgagttcaaggccaacttggtccacaaagctacaccttgtcacaaaaacttaaaaaaaaaaaaaaagaaagatcacatagtatttttattttgtgagttggaatatcctatgtttcagaaatattttaaactagagatatatcaaggccaaatgcatgtgtttattagacctctgaaatctgttgggaaatcatctgatactgatgtagaatattatcttggttagtagcctcacctatggctagtttgaattgtctctaagtcacagaacagttgatggtacaccaaggaaatttcatcttcatatgatactcttcagtacttccttagtgccctacacaggagctcctctggttccagcaatgagctaaggagtgaccatggagctaaaggttcttaaaactagaaggatcctcagagatttcctaagccgggaacaagtatgtagctcacctactactatgtccagctcttgagtccttgggagacatcaataatcaatttcagaaattttgcttccaattctttctcaacaaacactgcaccagataagacaatttactacctataaataaattaatgtgtgaatggaatcttctttgttcttttagatactataaactcttttctttttgatatgaaacaaaggcccccaagtatattagatatactttttctttgtgtggacttttaagagtcagctgcagccgggcgttggtggctcacgcctttaatcccagcactcgggaggcagaggcaggcagatctctgtgagatcgaggctagcctggtctccagaacgagtgtcaggataggttccaaagctacacagagaaaccctgtctcaaaaaaaaaaaaaagaaagaaaagaaaaaagaaaaaaaaagggtcagctgcattattttacagtcccataatgggagcaccccccaagggggtctgtatctaattttaggaaagaaaaatgagtatgcctgatgtatatgcagactaattaagtgttatactgagttacttatgttgatcagaggggactgaagcaagttgaaaagaatttatggagaaatagaacctggtgtggagctcatttattcatttaacaaaccaggaccatgtctgtatgtcccaatactctgagtcataaatcgctcaacaattcaacaaatgtacagagcctataaatcaatgagacagtgctgtgggcacagagtcctccattaggggcctatggttggtggggaggcagagaaatcggaagagagagtaacaaagaccaggcaggtatgggctttgtacatcaggaggaagtatggtggacagtagcagagtctgtggagccaaaccaccagggtttgattttatagctctgccgctgatcagtgacctcgggctactttctgtcagtatctcagtttcctggaaatatgcttgcaggaaagataaaataggtggaaacacacacagcactgacagtgacagcaaactctagatcttatcaaaggtaaaacaagaagggagggtgccttgtatctctcagaaggtgcttcaacccaagaagctgtgcggagttatatgctgaagaatgcggctatgggatagaagtagacagtgggatgccatgctggagagacagcctctccaccctacgggagcagcagccagaggctattttaaggccccaaatgagatgatctgatctgcttctaagcaaggtcacttggatagcagtctcaactattagcatagcagaggcttcaatgatggcatccaaatggaccggccatgtcttagtctctggaacctgtgaacatcaacccctacagtgtgatgccagttacctaaggatctggggaggagtgggagccagccaggttcggccaccagaaaaggcagatccagaggaagtcaaacatataaccctgtgccctgctcaggtcaagccctcaccaggtccctctaacctgtggcaagcatcctattctcctgggccttgttctacccagcataactcatatgcattctctctcccctgctctgcttctctctttctccttccctccctccctccctccctcttgccctccctccttcccttctctctcccctctcatctccacctttaagatggcttcctttggaattaaagcagactcaaaacccaaaacaaaacaggataatgttctctggctgtaacactgaatcaccactttctcccaacccttccacgccccagtgcctccaaagaaagtctcatggggttaccttccctcctccactcacagcacactggtgagcatcctctcctagcactgttcagtctttaactgctggtttctggtcagcacctcctctctgcactcgttagctctctgtctttcatatccctgttcaagcgggttcatttgtcgccccagctcttcctgagcctgacctgttctacctaacactccactccactcggcttgcaacctgtctccagactccagactccctgcctagcttcacccaaaggcccctggaggctcttccacctcaatatgtccacaccaagcccttttctggaatccccgatcctgttaaagacagtcattctcactctgaccaaattccaccaggccctagggagttaacttgatggccttcatttcctcctacttccactgcctggatgaggccctttctttccttgcttagatacgaacctggtccaccctgttgtttggtccctttctcagcaccatttcaaaccttccagcccatccccaacctttccctactatgtatttaaggagtcaggatgccacagatatctgtgcaacaacttgtttcttagctggcctcagactcactgtatagaccaggctggcctcaaactcatagagatgtacctgcgtctgcctcaagggatggaattaaagacatgtgccaccacaccagtcagatacactcttaaatcctgatgtaccaatgctagggagatgaagagctgggtctggattcatgtgattcatggacggctccaaaatgaaacaacagaaagcaaaggctaggtccaagtgaacactgtgaggcatgtacagagccactccagggcagaagacacaagactgaataagggtgttactaggaagttggggtgattagctcagtctctacactagagatgattgctttcttagagcccataggaacagctcagcagtgaacaggtttgacagctgcccagtgcaagcagtatttgtagccttttctgaaagtccccaagctggacattgaagatttctccacacataacctggagggaaggtgacactgcctatagcaagtgtgatggggagtctacaagtatctccccagtactacaagcagccctagccttggtggctgaattctcacacaaaggaattctgctttgacataattcccactaagactgcaaaatttcttcccactgactttctgcctgttaagcaagttgagaattagtccatagagaaaaaaaaaaaccaaactaaaacaaaacaaaaaaacagtcactaactttgtctattccctctttttaaagcaactagtgctacagatgctttagtgccatcaaatgccattaaacccattactatgggcttcaaattataaactggacattaggcagaatacactcaatttcaaaacaaaatattaattgtctcatatttaaattcagattttcttccatgtagcatttaccgaatgcctactacatgcaatccataaactggctatttccatagtttcttaataaacactggtcacactctctaggtagctgaggttgaccttaaactcctgatcttcctgtttctacctcctgattctgggatgacaggcttgtgccaccttgcatgggaaaaagaaaactttgcctttagattcactaaccagaatattttacatagtcatagctgccaactaatttcggggaccaaataattttaatggctgtgttcatgttttgcagaagaactaactgcatttaacatccgccccctttttaaaggcctacatgccccaaaaccccccaaagaaaacttcgggagagctttggtaattttgctggatcaattcaggcagctgtagaaaaacttgactatcacagcctcaaaaaggactggtaaatactcaagacaagtggctgggattgcattgcttattaaacaggcaagacagtgtaaactgaacaaaggaagattcgagttttcactcagacaaaggtcctctgagtggcaagaggaggactccagctagtgtctgcttggacaccctgatggtttctcctgccagaaggtaacatacctggtctgtcctacttcaaaagagcaagcaattgctaaacctcggctgggcacttacaattttaaatggtggatttgtggctaaagcaaaataccaggacacttgttctggctcagccacactcaaactggggaaaggggtcgactggagatcacaggccagtgccagagacatagaagggaacccttttttggcctgaacatgttgcttgtgctacttgttcaaaggccagtgagtaaaggccaagctcccttcccagagcagcctctgctgaattgggttgtggggcaccaaggctctcgccagctgctggggtggaaacacttggtgaccaagaggactctctgaagtgctcagggctgcagacacacacagaactgggaaggagacacaagctttagtcacctccaaggctttcaaaaacagatttaaaaataaagtctgtactaatcattgggaaaacaaacaaggcatgtcttcaaatccattcattctctcggaagggcctgttattttaatgtggtgacgcaagatacccccccccccaacgccctaaaccgcttggcgctggggaaagtgagcactagtggctttacttccccccctttcctcccacaaacgtcctctgttaaggcgattccaggatgttatttatttactagaagcctggcttctttttgcataaggttccagaggagcccatataatcccaatgattccattaacttcttaaggcattttattttgttttttggtggtgaagaccttggaggagagcaggcaacaccaagtcgtcccagactcgaacaacgtgcatacccaggaagaagaaccggctgtcccatctcttttccagcagaggcagctgcaatttccagacagagggtagaggctgcctagggacccactttccctcaagggtgcacctgctgtcacctgctgggctgccctgcctgggatataaagatccccagggcttccaccctaaagtacactgtcaagctcaagttcaaaagataatgtggcctgaaaatgaaattctaaacatgagtaactcaaacctctgagcagtggctcagacatgcacctagtcctggctcgaccgtgtgtcaggtgtgggtcacttaaacacatgcgagtgtgaaaacaaataaaagcgacttataatatttttaatagaaatatgtggtgagcaggtagcccaggaggaagaagggggctgagttctctttagcgcggttgcctgtggcctcccttgagccacaactgctaggtgggaattcaggcaaaaatctgattggaggagggcaatcctggaagagggcacccaccccctgccagaggctccaacattcccaggatctttaccatcctgcaggcccagatgtctcttcaaaaccgacagaaaactgtaattcataggtctcatcgggctcgaaggtggtggtggtggtggtggtggtggtggtggtggtggtgtgcgtgtgtgcgaacagttaaggataaagatcaaattaaaccctgcttgttttcaaatgacccctgtccaccttccaagcccctttgatcatattgaagaaatcagggacagcagctcccggagcacccgaatgggggttccctatgagcattgttcctgcgtgaaagcaaagcgctcgggatgtccccgagcttgggggtccaggcccagggaatgcgggcagctcaagccacgccgagcccacccgaccccgcacgcggcctgtccccgggcgcgcgcctcgccccccgcgcggctcacctagcaccacggcggtcaccgtggagagcagcagccagttattccgcaggaagcggcgccaatcgaatctagagctcgtgggcttccccatggtgggcactggcgctagcggcgattccgggagcgtggcgaatgagggatgccggatgcgggatgctggatattgggcgccacagggacacagcgcaccggctgctgtcagcgctgccaccaccgctggggaccgagcacggtggttttgcgtggcaggcgcgcccgactcctcccaccgccgctcgctgcagcgccgcggccaaccagcgaggccgagggcggagcgtcccggtggggcggcgcgcgtggggcgatcgggtcctcctctaatccgagcggaggcttcccaccggaggagcttctgacctacagagagtctccttggggacacacagtcctgaccggttgctaggggattcgatgtggggacgcttttctgctttggaccccagggcgcagattctctagaagaaggaacagatttggggaattttcccaccggatctctgatattccccgcgggattatttaattctctgactcgcagctcaaacaggatccgccaggatccaggcatacaccccgcctaaggcagtggtcaacttaacaattgccccctcttaggtgccttgcacaatttaacaattgcacccctaggacttgctctgtggccatcattctataattaggggtgagaaccaggcctggctggtgtggaaggtgggcgggcccatcccatccccaaggccaaataccttacaggatgttgttgaagaatctgggttagtgtggccatacactcttgcactaactgaatttctctttctgttttcaccctgatttaagcagactcttcacttgccatgagcatatcactactgtaactaagtgagccttgtacctttttggcattatggagtttactctgtggttgggtgtcagggcaatctccttgtccagattaattgatcgatagaaccccacaattagaaccccattcctttggtttaaactgattaattaaaaaaataaaaacttcaaaatgcagtggactaggttttattgatcatgtacattacagtatgaaagatcacttcccttccaggggttaaactttcaaaaaagtcaggagagagggaactcaagatcattgggtgtccagtctagagatggaaataaaaatgtctgaagaagcaaactatcaagaaaagaatcattccattaaaaaagggacaaactcaaatgcccaatgtgaaaaaggggggtatattaagtattttatagaacttcatgcagccagatgcagtctacagaaaggaaactaatggagtcccttagtaccatggggtaagaaaaaaaagttaaaaactgtatgtgtaatttgatcatatgtatgtaaaaacatctgtaaaacagagctatgggcttagaaatgacacagtgaaatacactgggactctgcagtggtgtgccacatttttgtgtttccccttccggtgtcctgtgtgttagaagtgcctccatagctgtgctccagtgtgttctattggatttataaaactagcacaccctggagatgggaccttgtcgacctcacagcctttgcatactgcgaggaggaacttacttccagtccctgcactgcttactagtgaggtggctttgaacctgttccttaatgctgacatttcactccatctgtgacaagggtgctcagatcttcactcccggggttttatagaagttgtgagagtcaaaccggatgtttgcctcacctccatcttgtgggtgggcaaagctaggtgcttgtgagttaagaatggtgcacaggttcttctctgtgttgcgaggaggagcagggattgaagtgagaagccgcctccaagctaggttattgaactaattccctctgggtggggcatacacagagctctgatagggaagtgtctcttgagtcactggtttgcttgactcaaggtccttaaggatataccctgtccacttgcagaagacacttggacatctgaatgagctgttctcaagggaacagcaaatctattttatgggagcaaggagtgaacttctgaatccactgaccttgtgaccggcatctcatactttgggacttttcagcctaaaacaagaaatggtgggggcaagcactgctatggagagaggagttggagatcctctctgattgtgaacacaaatgatgtcagatggggtgacagtggagggctatttctcctgtatgtagcacacctgtgcctggaagacgacttccctgtggtaaaagcctgaaactaaagagtaagaactggtggagttgcttttctacaataaatgtgaacacctcccttctattcctaagtctctcaaattcctttatcctttgtctgattttcattaattaaatttctctactgtgagaacaactcctccttctaagaaactggtgttccttattgttattgtttttccttttttcttttaaatgttgactcatggaataactagttagcaattaaagaaaagagactttgactttgtcacacaaggttaaacagcaggtgacagtggccttttatatcaactagtatagaaatgaaaaagaaagtcagaaaccaaaggccaactcttaatgaccagcccctttggaagtgatttgatggctgcagttattccatcacaaggcaaatacggttgaatggtgtcacacagcagtgatggaggaggtcacaagcacacaagtgatcttcaccttcttaggtagtctaccatgactgtaggacctgtggatactgtcagtgtatcagatgccctttggtaaaggctcttctaatcttgatctggagcccagttatcttgggattgcaagccaaaaacattaacctggagaaatgggcagtattgtgccctgcatttatatatctagaagatacaatgattttctttcttgaggatgattatacagtttgtagcatattttttaattaggactttttgaccagttttgagtttcgagtttctgtcatgggactgctgcaggaagcttttctgaacggagctgacaacagtactaacctgtgggcacaaacgtagttatttagttgtcgacagacttatcatgtctgtgtcacaaaacaacagcagagcctgtggtagggcctgtgaccacccagctgtggctctcgcctggttttacagatatatatatatattccctcctatgaagcagacatcaaatcagagaacactgtaaacaactctcgtgagtctcatcagatgagtcatgaaagtgaaagggggaaactgggaagaggagagtattagttctgagggagcatgaagctaacaggagaggctttggggggcatgaatacaatagaaacaaatgcattatgtacatatatgaaaatgttatattggaatccattattatgaatagttcatatatgttaagaaaaactttattttgttctgttttgtttttctctgtgtaacagtccaggctgttgtggaactcactctatagatcaggctagccttgaactcacaaagatcgacctgcctctgcctcccaaatgttgggattaaggtgtgtgccaccaccacccaacaagaaaaacatttttgcaaacctgcttatattcttcacatgaatcaaaaccgtcaagatttctaccaaaacagacgcaaaaacaaaacaataaaaaaatatccaaagatgtgagcaagagctgcttaacccaggtctgtggaaccagcttaaccagaactcagactggcagaagactcagtgtggagaggtctggagactgcacagtgcaaagcagagaataacaactttgtaacagaatgttgcattataagcacaggtgtgtatccaagtgctaatagaggttgagacccgaatatctcaagtttgaggccagcctaggtcacctagcaggaccctgtctcttaaaaataaggatatcaaataatgtgggatgcagtttggaaatattaggttgataaacacagatgcaaaactatgggtgcctgtttgtttgcttttgagacagtgtcttctgtagcatgggctggcctctaacacactatgtagccaaggatgacactgaactcctgatccttccacacccatctcccaagtgctagggttacaggtgtgtctcaccatgcctgctataaatctacgctttgggatgtgaaaaatatgttataaacctgggctggatgttttcatacaatgaggatacagtcatttttcactcatgtacttgaaaacaataaatgacatttgtacaacacagttccagtggcgtgtgaagaattgtgacatgctctttgtgatgtatttttttgccctgcactttcctttccaagctcagctagctgaggtcttcacatgcttggagtaggggggtcagaatttgctaccaaggattctaaactagtcaccggactcctctcttgcatgttctcatgattaataatggaaaccagggttgttgttatcagggacaggcacattctttgttgtctccccattaactatcaaaagcctagcctagcagatctgttctgaatgtgtcccagaaggtgaatgagacatgggagataagaaaaaaattcaccagtgacctagtaggaagaagaagaggagagtgggaaggggtagtggctttgtctaggaagaagctgtgtgttagagaaaagacaatgattactctgtaccctgttctctacctaggaaactgcctgctggcttctccttccgatccccatcagctcacagtcaggacagcttggtgaagcttcgaacagcttggagacttcatttcccagtgtggagtttgagcggtttgactagatatgacctgtaggtggacgtttctgtccctctcagtcccgcagccatttagtcccaaataaacacagagaggctaatattaattatgaactgtttggcctattgctcaggcttcttattggctagctccctcttaattattaaccaatttctattaatctgtctatctccacgtggtcttgatttaccagtgatgcccagacttcttgcttggtcagcagcttcctggggtctccttgactctgcctattacctttttctatccctgtttggatttcctgcctggctaaatcctgcctgttcattggtcaaaataggtttattggtcataaaggaacatatattcacagcatacagaaggacatctccattaatgaaccccatagactagtgtgattgaatgcttggcccatagagagtggcactattaggaggtttgactttactggagtgggtgtggctttgttggaagaagtgtgtctgagttgccatggtcatggtgtctctttacagcaatagaaaccccagctaacacacccagttatcctattcttgatgcctgtatactggcttaggagtcaccatgggtgacaagacgactcagaatctggggaacctgtgttcactgcctccgtgcagacactttcagctttgatcccagcactggctggggtgaggccatgggtcctaaccaggagacagtacaaaatacgtcttcatagacacaggtttcagccatgctacagggcaagtctgccagagccacagagaatgaccaagtggatttcagactcttgataaatccacacattacttttgttattcaatattttttggcctacttgactcacgtagcatcagctggcctcaaattcactaaagatgactttgaactactgattcttctgcctgcacctgccaagggctgggattacaggcgtgtgccaccacacccatcttgttaatttttccaagtctctttgatgctgcaactgatcttggtcccatctacttgtttaagagaccttacctggtttacacagttccccacaatctgtattgcttctgcacggtgacagcctacttgattctctgtaccccatgttttctctaagcggataagttagagttcaaatattcagcaatctgcggtttagcaggtaaagtctgatgccaggggttcatctgtgacattcccccatgacttttttcattgtttgagcatctttggtaatgatcaagaccattcaattgaagtcatgaagtcatcctgattttatcattcctcctttgggcatggtgccacggatttctcatgtgactttttttttttttgtactggtatattgacctccaattaaagatccccaaacctcagtttcccaggtgaattgggattgcagtcatgtgctacctcacttggattcttgcattcatactgaatatattttctggaaacaactatttggtcaatgtaaagtagatttcctacagaaatggtgggacaggttggttttcttagtaaccaacgagtgtactggcagctttggattgggactgctgggagcttttaaatgtaccgaagtattataagtaggtgaatgtgttctagtcacatgctcaaactccatatttagccaataagagctctctcatttttttttctgacttttgggcaagcatttgcctacaactacattcttggtgacagggttcattgtgaccatgctgtccttgtttcttgactttttccaggtgaaaggggcctcctgcctttccaacccaagtgctggaaccacagatgggacattgtcatgcctggcttttctatgtggctcttggggacttgaactcagatcctcatgcttaggcaatatgctctttacccactaagccagctccctgaccccaaagtgtttttgtgttattaagtcatatagtaacaagcccgctggatgaaaattgatttcctggtggttcctgtgactcctgaagactcaaagtatgagtttaggagcaatttcacataattcttcaatacaattatgccctcaatttgatatgcatttaggattatagttttctatttgtttttaagttttagaaattcatttcaaaaaagtcaatagatagtttaaaagccgtttatttgtttagctacttattttagggggcatgcacatgccacagtgtacatgtgggtgtcagatagactgtgggaaacttctccttccaccatgtgggacctggagttgagctcaggtgggcagacctggtgactcagcctttagctgctaagccatcttgtgagccctctgtaagttttacacaatgtaataataataataataaaaacaacagtgacaaaagccttccatgtagcttccccctcccccacggcaggcagcgaatagttcagtctgtgtaagcctttggttggtcctgttgctctgtcttagaaaatacagacacttccattcataccccctctgttgatttcacacaggtggcattttatgggccctgccctgcgcttgcctttcttgttgaacaatacagcttagtgctcgctcacagtgaagatttcttcctcattcccttctctgcttatccctgctctgtgcagaccttgttctggaggtctcttcctcattccttcccatgcttgcagaatctaacagtgcatggctgtcccggagggttatttaacactctccctgatgatggacaactagttggcttccttcagcatttcctgcttatgaacaatatcacaagaagtagcattcagttcactcgatgctactgtggtatacatgtttaccagcaagctctctggaggagagaaagaggggtggggagggagacacacacaaagacacacacatacacacacacacatacacacacacacacagagagagagagagagagagagagagagagagagagagagagagagagacagatcaaaaatggccatgaaatgtagcctctggtaaataccccactaattgctccctccaaggctggtttccagtcagcagcatcaggtcaggcaatgtggcgtcaggaagagatatccaatctctggcttttatctaggtgtttctgggaaggtagggcagatagaaatcatctcaaggacatgcaacccatagaagctaacaagataaacagggatggttagttttaagtctttattaatactgtttaaatgtaacttatttagtttacacacacacacacacacacacacacacacacacacacacacacacacactggtttttcaagacagtgtttctctgtgtaaccttggctgtcctggaacttgctttgtacaccaggctggcctggaactcaaagatctacctgaatttgtctcccaagtgctgtgatcaaaggtgtgagctgtcactgcctggcaactactgtagaccccaatcaatccatgacttaatttttcagtttcagtttttgttttttgagacagggtttttctgtgtgtagtcctggctgtcttagatcttgttctgtagaccaggctgaccttgaactggactgcagagatatgcctacctctgtctcccaaatactgggattaaaggtgtgggctaccaccaccaggattatagttttattttatttaggtgtgtgtgtgtgtgtgtgtgtgtgtgtgtgtgtgtgtgtgtgtgtgtgtgtactcattcatatgtgtctacatcatggaggtcagaggtaggtaccaactcagttatcctcattcttttgagacagggtctttcacataccctggaggtcacctatttggctcggtcggatgactagcaaggccccccaggtcctcctgtctctcttttctcagtactgggcctacaaatgtgtgccgtcatgcccagtttatttggctttcatgacttggcttaagccaacgtatcgttttatctgtacctgttttaatagccggacaggaagttcttttggcctaggttagctagcactagcatcatttgaataactatgagtacacaggttctggtttttggttgttgttgtttttttttttttttcttttttttttttttttttttttctgaggcaagaaatctaaaggcaggcagcctggtctctacaaggaagctttttgtctgcatccctgccttttttttttctggtctacaacagaggcgagcagccttgtggttgaaggtggatggcaggataccagacgtcaggttcataatccagaaaataggaatggagaggtaggaacttgctacaatgtccaggcaagtttgctgtattccaagatacttcctgggattccatacagcactcttcttataattggctggacaccacagttatatagtcagacttagctgtaaaaataaaaggataatacatcttaatatatacatctgctcggcacttttatttatccattttagcttactaactaaaaacatggaaaataagtattaggtgggaaacaagtagactgcatctttctgcctaaatctttcaagcccctccccccaaaagctgtatctggtcacatacaattccgacagcattggtgcttcggggatggtcttgcacacaatatcacacaaaagcttcttatggcattatatcgatgttttctgtatgtgccagcttccacactctcactcccttttatttgtataaaacagagcccaagatttgtatttcacatgtctttcttgtttctcttatagtttaaaagtgaattgtagaaaaacaggtcagtaacacaacacagtgttgctgggggaaagagaagaaacaaggcacacaaaggactggaaactatgaggtgttctatggtcccatctctctcctcttctatctcctcctcattcctcttatctttgtttttccttcctccaatcaaatgtaaagaagaggctgaggatggtggggtgggaacctctctctttgctgagtcaatgctccgtacacgttattggatggcttctgcagtggaaattccgatagtatctggtgggtggttggacttcctgttctaggcacatagtcaaatatccctttaggtatactcctattttcctacttattgttaacatgtattacttttttctatccttggatctggcttatttcaatccataagtgtattgtgtaatttacccatactgtcttcatacataaagagtttacattgtataagtaggctgcaatttatttccccttatgcagtggacagaccattggactatttgtggcagctcctattataattaagtctacccaaacaatcttacacatgcgattgctatacacatgtcttgggtatatggctacctgtggaaatgctgggtcacaggacaaatgttcacctgtattagaaacctccagacagctctccaaagggaccatgctcaccaccatctggagctcccaggctgtgcaccttcatcagtgctatatgcacagagagtgttctgggacacttcttgtaaacccttggctgagaatgaaggctcttactccattcactgagtcaggtatcattgttggctgacagccatgtgccaagtgacagctgtgacaatcgccatcacacagagagaatggtcctacctgcctcaagcaggccctgtgctgactcacctgcggtggcagtgagaatggctgtgatggccctggcatgtaataaatcatgatggataatggcagtttccgactccccatttccagtgctcttcggcagataaattgagactttggtagcataattattccttttgccccatggcatcctcacacctcccaatgccttctcgtgagaattttagaaaacaaacaaaccttcccaagtgcaaacttgaaggcatcagtctgttccctctaggtcttgacctagttctgtattctcaggttttagaagattaactgggaggctgatcagtaaactacctttatatacatgtgaggctgctgggtggtggttgggtgcacctttaatcccggcacttggaaggcagaggcaagtggaactctgtgagttcgatgccaacctggtctccagagcgagtgccaggagaggcttcaaagttacacagagaaaacctgtctcgaaaaaacaaacaaaaaacaacaaaagaagacacatttgaggctagagttccatcttagcacccatgtgagacactgaacatggtagtatatacttgttttgttgttgttgttgttgttttcacataattttttattgtgtcttcaggaatttcacatcctgaaccccaatcccactcatttctcagtccctccatatcctcccttcacccttgtagcacccccaaaggaacactaaaaaaggaataataaaaataaactaaaaataaaaaatacagataagaatattcatttaaaaccaacaaataaaagcaaacaacagcaacaaaaccactttggtcctccatctttctcaactctccatcttcattcttcttagtggcattgagagctgccgtgtattgtgcagtagacccctttttccagacagctttccttgcaaatattcattgtgtaatatgtttttggtcaggttcaaggcctgtggcttcctatacaccaacaatactgggcccccactgaaactcatctcagatatcccgctatcgccctagtcatggagctcctgtcgctatggttctgcaggacctttttgcactccagcaggtgagcaagggtagatgttggggtagatgggatagatgttcagagtgtcaactcaaagccctgatatgtgcttgggtggtagctgagccggtcagttgggccccaaggacagcccagctttcccaagtgtgggggtggggtaggggctaagggggtgtcaggggcagcattcctattaggggcagggtccattctcctgtgctggcgggtcaggggttggctatcttggggttcacaaaaagcagggtcagctctgtaattccaactctggggaggcagagacactaggatctctgggacccttggttagcaatctagtctaattggtgagttcaaaggaggtggacagtatttctgagagtgacacctgaggctgtcctctggcctcctcgtgtgtgtatgcatgaggacatacaaatgggcacactcatcctcacacacattcatccatgcctacataacatatgagcatgaaaaaatagctggcccattatggtgggaaaacgatggtatgccatggtgattttagtgtccatttcccacgagctcgtgaggctgagctgctccacacacggaatggacatccggacaccttaactgtcccacctttcagtccagattcttcttttcttcctatgacataagttctttatttatcccacttttcccccaggcttgacttttactcttctgatttccacagattttctgaattaaaagttgtgaatattttccaatttaagtttggggaaccaaggatttttgcttaagaaacacttgtctacaacaaagacataactatattatgtgccttgtgttagaagttttattttctttctctaatttttggtttaaaatccatctaatccatttttctctgtgtgaaaatacaatgaatctaacagtaatttatgaaagaaaaatcggcattgttgtcatagctaggcgtgggagcctgttcctaggcagggttttgtttcattgctttatttctgtgtctctcccaattcctattcaaaactgtttttataagtcaataattagagctagtgagttggatcttacaaatctatttttccaaattgccctgcttagtgactaggccctgaacttccacatttgttccaaataactttctaacgtacatagaaagattttctttggttttgtttgagaatgatttgaatccatagtagaatctgggggagatgacacatttatagtattccagttcctgagttttgttttctaattcactatcctggtatctttctttgttcagattttccttagttgtggaagcaatgttttatagtttctatgtagaagttttgtgaatctcttcctagattttttctcttgaatgtaccttgatgttttgatgcatttcaatgcaaaatagtatctttttagatgtttaatacttatttattttatgtgtatgggtgttttgcttacaaatatgtatgtgaactatgtacatgcttggttcctgtagagggcattggataccctgggaatggaattatgggtgctaggaattgaacccagttactctacaagaacaattagtgctcttaagcacagagccttctcttcaactgtaagataaaataaacccctctctctccaagctgctttggccatggtgttttatcacagagataaataaacaccctacttaagacatactgcaagttttatatctatgttataatgctacataattttatttctcattgtgaccttgcctggtcttagaatcagagaaattatggtctcctctaatgtggagtttctttgtgggaggttgttttctatgtatttgtttgtttgatacagggtcttgctccatgtgggcttgaatttactctacagcccaaacttgcctcaaactcagtcctcctgcctcagtcttccagccactgggattgtgggtatgcaccaccatgcctgacactgaatttaatttctttaatttgtcttgatcattcaagctttctgtttcttcttgaattaatttctgtaattcatatatatggtggtttgaaagaaaatggcctccaaagaaagtggcaccattaggaggtgtggccttgttgaaggaagtgtgtcactgttgggatgggctttgtggtctcttttactcaagcttccctcaattgacttcctgttgcctgcaagaagcagcactctcagctctagcaccacatctgtctgcaatccatggtccctgtcacgatgatagcagactgaacctctgaaactgtaagccaccaccccaattaaatgttttctttctaagtgttgccatggtcatggtgtatcttcacagcaataaaaattcctaactaagacaacatattagtggatttattcatttcatctaagctgtcagacttactggaataaagttgttcattaataccctcatgtgttaatgttttcttaagtcttcaatgaagtcttatttttcactcccaatatggtgtagatgttggtgtcatgtttgctggctttgagagcagcaggaacactaacctgccatgagttattttattagtgctggtgctaatgctgctattattacctggggcaggtcctacaaccctgctaagtgtcagtttccttgtctgaaaagtgaggaaaacagtatcttgtatcacaatgttttagtaggaaccaagaaattcaaagtgaaattgcttcacggactaagacaaattttatagataatgcacagatcaagtttgggttctgcatctgtgggtgccttgaaggaagaaaatgtctccttttatatttctgtaatacttaacacagatcccaggacatattttgatttaataaatattttgttgaactcaaagttttatacatcagcagaaacaattctcatacattaactccgaagtaaaagtacattgtatgcccaagtcattgatgacctccggattaaccaagatgatatttctggtttttattaccattatttatactaaaatacacccagtaatgtatgtaaatttcatggtgtcttacagggttagcttttcttgaataactagaaaaatatgtctagcaatctgtaaagggtgggggaatcccgaagtcctgtctcatcctggaaactgagggggaaatgcacatactttggcaatcaaatgggcagtgtacagaatctgtaagcagtttcctaagagctgtgtcagtggagtttgcagactctaatcaggtggccacacccctttgacctgatacaaatctgtctgttcagaggaattaagtcgaccggagacaggtctggcgtcatctttacaccccactgaccttcccttgttcatacatgcccatctcccacatctggtttaagttcaagagtgagcttcatgctgattccatcagtgtttcctgaccttgatatttcacatagaaccctcttaagttgttgccacacttaggtgctacagttatgggttttgcctaagattgtcttttgacaagttttcttttacttaaagggttgtatcccaagagaaacaatgttatcatcaaaaatcagtaaccaacaacactcttttagatcataataaaaataaaaaatgacaatgaaacaactttatttaatgctacacagcgacttacttattgaggattcggaagtggaggtctgctctccattgcaatgaaaagtagttagaaattcattaaaacttaaacaagctgatttatttttaatgtaacaaaactcccaaagaaatggaaacttgggcaatctctttgctaccttatttcatgttgcttaaagattggtttcctatcacacaaaggaatctcttgggcctctctttgagatacgctgggtcacatcccaggcctcatctattatgttctattttcctcctccaagagttaataccttctccttcagttctcactcacacagtgttcttgagctatggatggctcttctttacctactgatggccagctcctctctaatgctgtcactgtgggaaataaaaaaaaatccctgggaattttatgtagaaacagtcatagggaaaatggaaaagcaagaagtggttggtgatctcgactcagacaaaagtcatgcagtcttcctgtatgacagcattttcaagatgctctcttcactttctgacacttttcttttgaaattcatttgtgttaaaagtaggcatgttcttctaaaatgcctgaagtcagggccatgccagcagtgagagaaagaacagacagagagggggcagggcagttgtgaaaggatgccactgaaacaacgtgaatatggtctatagattacataagggtatttggaggagtgttgattgtctgacattaataattcatccgtgattacataagagatgcccttgttttttttaggaagtgcatactaacatacttaaagttaaaggaatcttttgtctgtgtcttaccaccaaatggcggagaacaataacaggtgggtagaccatgacaagcaaatagagaaatgattgaaagagaagttgcaaataattcacatttccatttgggagaagaatacatgctaatttttacagttcttaaatttcttcgtctacttcaccgcccctcccctcccttttgctcttccttttatactgtaacctaggctggacttaaacacacagtgaatatcctgcctcagactcatgagccaatatgcttggttctaaacttatactttcctgcaagtctgtacatttttataaataatatgtcctaaaaatctgctctacactatacataaagaggactctgctatgacatttttgcagactcagtttcctctagacccaggaagatctagagaaagagagtgggtgccatggtttgaatgtgtcccctgaagttcatttgttggaacccaattcttttttctttgtgttgttgttgttattgttgttgtttttgcgtctttttttttttgaggcggggtctcactgtgtagctctggctgccctggagctcactatgtagaccaggctggcctttaactcacagagacccacctgcctctgcctctggagttctgggattaaaggcatgtgtgccagcatgtctggcagaaacttaggggtattaaaggctgcaaactctaaaatgggtttaggtcatgagagcttgcttccacgagtggattactgctggtatttcaggagtgggttcctattacaataaagactcctgctccccccttcttcttgtctcaccttctgccacgtggttacagtaaggagccttttgccagacactttgatattagacttctctgtctccaaaactataagaaattatgtttcctttgtaaatcacctagatgatggtaaaggaatacaactcagactgaaatagtgagctatcttgattgacagctgtgatgactaatcttggttgtcaacctgactgtgccggcaagcaatgaaaacccaagctatgggccctcccattaggaggaattttcttaatcagattattcaaatcaggaagacccaccctaattctgggccatgccttctgatggcagcccagatcacgggagagggaagaaggaagctttacttttttacctgcttgccttcactctcactggccagttcatcaatgctgctgcagagccaacccttctctgtattagaacatactcctctgggatttcaatttagactgaagatcagcagctgttcaggaatcctccaggactcaatcaacagactggactgaagagacatccagcttcatggagtgaacaactaggggattttcaatctttctgtcttaagacagtcattgttgaactatcctgcatgctagtctaatacatacatacataatacatacataatacatacataatacatacatacattcacacatacacaaaatatgtacatatattttagtcatatatgtgcatatatatgtatacacacatacatacatacatacatacatacacacacacacacacacacacacacacatatttctgtcagttctgttcctttagggaagcacgattaatacaacagtcctctaagactgcacaaacaggaaaacaaacccttccttaaagtaaagtaagatgctgaactacaaaagagatacaggattctggccaaatacaaatctgcactgatctaaattatcaagtacctgagcaaggcagtgagtgcagtgtgttacagacacctcacaaatcacaatccctaacctcacctcatttaggacaaattaggtgactcatttagagtcaccctagtattcaaatcctgcctcagttggcaccatattctttaataccatccaaaattcaccgttcaatggaatccctcaaaggctagccaacaagaaagataatggcatccactgaaagagagcttttgggaaactgggctgaccccatgaggagctgaggaaatgcaaaacagcttacttccttgtagaagtttccaggtgtctgaatagaagttcaaggagttctattgtaacaacccggttccaactaaaacagattgtaacatctttgaagtacaatgaccagactttcgctgtcattggaagaaccatggacagcatcccagtttgtgtaaaattttagcatctgaaaaacagatagaaatctttacactagaatgtgaaaaatactaattttatagacaagtaaagaaaatcttcctccaaagtttacacacaatattgcccaagattagggagagctgaaacacaaatctaagtgttcaaatctgagtccacgcccgagtgtgtttgccctccctgtgtcccagcacattggaatggcatgtgagggaagaccaagggaagactgcagggcacagagggaaatgttgctagtctcccttccaacctcatgcatcctctgactgtggcaaatgcatctgtacctcttgtttgaggagctagctttcccgtgcatacggcagagaaccgactcctctagcaattgctctagcttgctttctagtgctgtgatttacaaaaatgataaaaggctgtagtaaagtgagttttcttggcccagcgaggtcccaccacccttctctgctccaaagaagcacatggatgctatattagttatgaaactgttggccaatgactatggcttctcataggctagctctgtcttaattattaacccatttctataaatctaagtatttccacatggtcttatcttactggagaaaggtccagggacctcttattcctctggcgtcctacatctcaactgttcagcgactctgcagagaaaagagagcaattttctgtttgcccctgcttatattctgattctgcccagctacatcacttcctgcctgtctgcacagacctccagacccgtatggttagctagcggcagtttctgcccagctacatcacttcctaggatcacatgatgacgcctctctgcctatacttcccagaatcctccttgtctcctagtcctacctatcatcctccctggccaatcagtatgttatttatcaaccaataagacaaacatatacagagaagaacattacccatcccagcacccaggctgtctctagccaccaaacaaataaaaaaaaaagaaagaaaagaaaaagaaagttcaagttacagaaagcaacttggggagaaaaggatttatctggcttacaggttatagttcattatctagagaagccaaaacagaaactcaaggcagggccttggaggcaggaactcaagcagataacataggggaacatttcttactggtttgtttcccatgacttctcagatactttctcataaaacctaggaccacctgtctagggatggcaccatccataagttggctgggccctcccatatcaatcattaatcaagaaaatgcaccacacacacacacacacacttgcctacaggccagtctgatggaggaattttctcagctaaggttctgtcttcccagatgatcccatcttgtgtcaagttgacaaaaacaaaacaaaacaaaacaaaacaaaacaaactagcacagccatcattattaactatcaaagagggaatgagaaaaggcaggggaaatactgaaggattatttcaatactcatcacaagagatgttgaggcctgaggtggtaaagttggtggaaagtgattagatatttgaaggcagtcagtattgtattctgaagcattgcataaggaggtatgagaggaaaagagaatcaaagatcagccaaggtagattgaggacacagaggtgggaagcctgtgctctcaagatctccaaactgaagatgggaatctggggacaaagctgcaaatgagcacaggaagaaatagccagtaagcaaaagaaccacaagaagggagaaagtggaacaggaagtggacagacactgtgaatactgccgcatggcagaaaaaattaagtctggagattagcactggggaatgaccatcaggccacagatggcctcagcagaaaccaatgagtgggatggcggagaacaacactctacaggcttgaaccactgaattctcggttccattaaaaatagttattgtttgttttaaaaattgtgccaggcagtgatggtgcatggctttaatcctagcacttgggaggcagaggcaggagaatctcagtgagtttgaggcgagcctggtctataaagcaagttccagggcagccaggaccattacacagagaaaccctgtctcaaaaataattgcattattttgtgtgcatttgtttcgctggcatgaatgtatatgcaccatgttcatgcactgccctcagaggctagaagagggtgatggatctcctggaactgatattagtaatgcttgcgtgctgccatatgggtgcaagggattgaacccagctcctttggaagagtgaccagagatattaacctctgagccatcgctccagctcctagttccaatcttaaaactcccaggacagagcctgattaaccatccaggccaagtactcatctttaggtgaaatgattattgtctcagggaaggggcatgtgatgactcagagagagacccatcagcaatgcaggatctccagaggtcatgtgagaacatgggcattgctttgtggatatgtgtggatggagaaggaaggtagttcttggccagaaataaagccattctcatagctgtatgtaggaaggcaacacttgaggcaaggtcttccctatgttggatctatgacttaatgttcaattgtaaagtaaggtagaaagctcaagtttcacagagtcagtgtcagagttagaaaaatgagagaatgtggtcaataaactctgtgcttgctctgacttcaatatgagggcaatgagttactacaagaagcataaagattcctagcatagttacaagatggcagtgcacactgcatggcccttctccagcctcatgttctgtgctctgtgccttatgttccatgaagaagctgcagacatgtgaatgaatacaagtggagctggatgtcacggctagtgaaagaacaacgtgacccaacacccccatcacctcctcagccccacacccccacacctccacagccccacacccccacacctccacaccctgtttatatttcagaagagatagaaaaaatgctcttaatatttttcaaaacatagcagaaacatacatcccagagggaggtaaaaagcaagagctgtatgaggctcaacagcagaataagatatagcattgccactgagggagaggaaaaaggagaatgaaagcctcccatgattctcttctcccaagaccgccatgctgtggggatctgtccttattccctctttcttattctgacaactcatttcatctaaaatgttttttaataaaaagagatcttaaagatctcacatgagcctagttactcgcagaccctatgttccatacttaaggaggcttgttaattctttgatacaaatcactcctgtttgaggaaaagcctgggggaattttgttcctacccacacagaattgagaatacttaggacccagtaggagaacgtgcctggagttgcagatccttgtcttatggtactacaagagaatgtctagtgagtctcagtgcatagacacaccactcctctcctgtctttgctacttctcagatatatttatattttaagttaatttataaaattgtatatatttaacatgtacaatatattttaagtgtgtatacgtcttgggatgcctaacacctaacaaatgcattgcctcctggttaccatttttgtgaggagaactctaaatagccactatctgagcatttttaaggttacaatatgttgcaattaactatagtcataatgccacagatttcctgatcttgacggtaattatcccttctcctccttttcctccttttctggtggcagctttacctttttaattcccacaagaattaaggtgctgaaattttggaacctcagctgtaagttgagctgatatcagactagattacattcctatttgcatttacttttataattattctctacctgcatttgagccttctataattttgatataaggataagtccccatgatctttctctttttatataaattattaaacaagggacacattttatattattttagaacaatttattgctgtgtctcactgcatcatgtggccaggtggtccagtactccctttgggtccctggcaacagaagaggcagttatatctctagaaggcactatgtacccctgtccttcccagcatcctgtgactgattggagctgtattaatcgctttagggaccaagctataaatgcagatggcatggatcttgaagagtggatgtggactctctgacttgtacctactgggtgatcctcgatccccaagaaatcaaatgcaagatgcaggtctatagctcttagcaatctctgacatcaaaggatgaaacttaaatagttgttttaagctatgaaattagggagttgatttgttcctacaacatagctctgcgagtctggacccaaacatctagtatctctcaatatttccccttttatatcttagctagaagggctctttgtctatgcaattcagaaaccctaagtgcatatggcatttttactctaaaagttcttcagctgcattccttgttgtttgtctactctgcccactacaacctaaccttcacccaactcacaatggatcatttactttttcattattcaccggcacgcacttgagtctttcctcgtcctgttggctttatcttctttatcacctttgctctcgaagcccgtgttctctatttgttcagaacagtctatactttgtgttctgaggatcttacgccctactccttctatcaagagaattacttacttcctcatttcaataatatcggaaccatctcaaatgctagctgagttcttctttagccttttaagtgccctgcaattctctttaaacccgtttgcatgtatttcttttaattttagcctttgtttatttggttgtcttttctgtgaaagctttttgagaggaaaaatacaaagttgtgtttgtctttggactcctcagccttgacatcagttgcccagaaccttatctggagttaacagcattaaagggcttcctgttgagtgtagcttctatctaacctatggctacaaaacttcattaactctttctggtacagggtatggattctgatcagtgtatggaggcaggtgaggtataaaacagagagaaagactggacagaatgtcttatatacccagtacccccatgtactccttaacaacggtgagtcgagtctcattttcctccacaggttagggcaaatcatatttaagtttcaaaggattgggcataggatgttatgggtgccaagggcaaaaacatcacattcctctcccctaccaactcagagatcagagaaattccgtgccagtgaaaggaaaagtatccagtcaggacctcccaaggccaagttctcagaacaagttcgtagcacaaaggagatttatttgccccagagggacagagggcagggataagggacaaagacaggagatagaggaagagggagaagaggaaagggaccaggaagaaggggaagggatatttatcccagagggacaaagaactgcctctggatagagagaagataggcatggcacttgggaaaatgatagtttataaaggtaaaaatgggaaaccctatgttaggatgaggtgtttagttttaattgggcatgctaattaggtgagccaaagggggcttctgattgctcaatttcaatactttgatagctggaccttagtagccaacctcaggaggaggaagtgctcaaataagggaatggacctggggaaaatctaatctaatgtaatctagtggctttttttagcaaggcaaagggaactggggagaatggcaatacctgacagagccacatggtggagtgggctagtatcccttcagtgagttacttaaagattcatctcttggcaaaagtagaattttattttttgcaggatttctaaactccaagatataatatttagatattatagaagaactggtgagatggctcagaagcacctgctgtgaaagcaatgatgacctacattcaatcactggaacccgcatagaaaagctgaaggcagcggcacacatctgtaattatgacagttctacagagtgatgggaaatggagacagtattgtccagaagctcccagggcagatagcttggaaaatctggaacattagaaataaagactttgcctaaacaaggtggaagacaagacctgtgtttcctgacttccacaaacatactgtagcataggcatccctgtatgtatgtgggcactcacatcagacacagacacacatacccacaccccccacacccacacacacccacactcccacacacacgcactaataagaagtgagaaatcggctgtctgctcctcactatttcagagacagctgcatcttcccatgcagtgccagccctatccctgggacataaagatgaggttcagagtgaatagatttggtactattgaatgcttagttgctagggatgccttcaactcaggccaagtagataccgttccattaaggattccttcattgacatcaaacacacatgatacatgttctagtgagactaagctcatagaaattttccaccatacagtcaaagctgagaacaggaaatttgtcatcaacaggaaggttatctccatctttcaggggtgagatcccaccaatatcaaatggtgtgtggctagtactgagtatgttatggagttcaccgtgtcttaattagcatctctacgccttctactgatgcctccatgtttatagtgggtgtgaagtatgggaagtatgacaactcatgaaatagtgtcagcaatgcctcctgcaccaccactgcttagacccctagccaaggtcatccataacaaccttggcaccatgagcatagtctctgccattgccaccatccagaagactgcagatactcaacacttctaggaaactgtggttcattggctatgggactgcctagaacatcctccctgaatccactggtccttcctaggctgtgggtaagatcatcccagaggtgaacaggaagctactggcatgattgttcatgttcccacctctaacatgtagtggacccgacatgctttctgcagaaagctgacgaatacaatgacatcaagaagatggtgaagtaggcattgacgggctctccttgatggcatccccagctacaccagcttgtctgtctctcgaaactttaacagtgatgactctcattcttcaacgtggatgctgggctgtcaatgccttgtggttaccttggcccccaaggagtaggaagtcctggattactcatcccagaaggaataggagagaaagagaggtccatagcttctggagactcccccacaagctcctcccctcacactttccagtacagaaactgaggagagggccttagggagccccattttgtcccacaccatcaatagagttcactatatccagaaaaataaatgaacagaatttgaaaacttagaagaaaaaattaacagtatgcatttaaattgtgtaccctatttgaggaaacaagcttagttttgaaaaaaaaaatttcctaacctcagtttggtaattctaaatttaaattcaaccaaaaaatttaaataaaactttaatagtcagtaaatttaaaaagaaattacttcttccagaggattcattatagcttgtgaattctgggcaccagagtacttcttgctgtagtgtttttcaacacttctttgccttgcaggcattaatgcctgcagaatacataccttacgatgtacttgcacacatactttcctgattctgaacttttgccgatcaagaaaagagattttaaaactgaagatggagcatgtgacagggaaagctagggaagcaaagagcagtgaaaaagaatgcaagaaggacctaggaaaaaagaaccctcgggtgaagcaaactggtctcggcactcaacagagggatgggttccaacaggcttgctgctttctaagatgtccattcaaccggaaatgtaaagagccctggtctccttcaggggagtgctctcaatcaagccatctgttgcacagaaaattccatctcttccctatatcagcaatacttagagtcaaagatatctgtaagaatgaagctcaagaagggggatagctgatcgattctgaccaagaaagatcgtgaagggcattagcggaggttctcattggaacagacatcaaacaaggactctcagccctcctacaaggtaaacagaataggatatgtaaaatagcatgagtacaccatggaggaacatctgggtggtgccaggagcaggatccaaaccatcttaaaagaaaataagggatggcaagcaggcttagtgagtcagggcacttgccatcacgcctgatgacctgagttggatccctgggactcacatagtagaaggagagaactgactccctgaaagttgttctctgaccaccacatgtgatctgtggcacatatgtgtgtaacctcccttttatacacttacaaaaataaaattttatgaagaaatacgaaagttaaagcatagaggtttgtagcaggtggagcgtatgttgtgaacaagaagcaagggtgtcagagtgagaaccagcacatgtgggtcattggatgtttgttcaatgcagttggaccctaagcaaaaggccagaagaggtaagaggtgagcaagaaggaaaacggatcagaatcatggaacatgtttgacaccataatacagaatctggatgtttctttgttgtcttagtctatttgggctctataagaaacttcagagtaattcataaacaacaaaaattaaatctctcctcattctggaggctaggaattccagggctaagctgcactagcagatttggtgtctgctctctggtttgccttcacatggtggaagaagggcagagaagttgctgtggccatttttatgaagatattcatttcattcatactctccagtctttatgatgccatcactttcccaaaggcctggctttataggccagtgactttgaagtgaatggggaaaagagttggtgatgcacgggaaatgcaggagtttggcgataacaaattgcatgagactggcaggccagagcacacaacttatttttccttattttcaaggaaagcatgaactgaattgtaacaatgctaatgaacccagatggaaaggaaggggggaaataagcttagcatgtgattacacacctcctaccatgtcagcacatggctgttacctgggtatctttattactccgtctgacaagcataataattatagtgtttctgtgaactaagtaagtggtgcatatcattttgcagaacctttgtctgatgcaggttggtagaagggcatcaggaatatgaatgaaaatctgagatcatatttcagactgttagatcccttcactcccgtcatcactatagtgacgaccatcagatctagacatgtcccttgagctcccactagctcgggtcagctgtcactctggtttccccatcatgctcttgaccccccccccttgttcatatgatccctcctccccctcttcagctgaactagcggagctaagcctagtgcttgccatgggtcactgcatctgcttccatcagttactggatgaagcttctctgatgacagttagggtggtcactaatctgcttgtatgaggatactctctccactattgctaggagtcttagctggggtcatctttgtggattcctgagaatttctctagctcaaggcttctccctaaccccataatggctccctctttcaagatatctctttcattgttcccccttccatccctcccccaacttggtcttcttgatccctcgtgttcccattccatcccctcccttctaccccgtctcccagtttaccctggagatcttaactatttcctcttcctggggccctccatgtgtgtccctcttagggtccacctttgtacctagcttctctggggttatggattgtagtctggttagcctttgctttatatctaatatcctcttaagagtgaatacatacaggtctgggatactttactcagggtggatttttctagttctgtccatttgccttcagatttcaagatgttattgtcttgtttagtttgttttttttttttaaacctttgagtaatactccattgtgtaaatgtaccacattttctttattcattatttggttgatggacatctaggttatttccaggttctggctactacaaataatgctgttatggacatagttgagcaaatatccttgtggtagagaacttgcatgggacagaacccaacctctgaatgtgggtgacagttatgtggcttgatctgttgcgggaggggccctggtagtggcaccaggacctatcccaggtgcaggaactggctttttcgagcccatttcctatggtgggataccttactcagccttgataccgagggggaggggcttggtcctgcctccacttggtatgccagactttgttgacttcccaaggaagatcttaccccctctgaggaatgaatgggggcagggtggaaaggaaggaggggggcaggagaagggagggagggggaactggacttggtacataaaatgaaaaataaattttaaaaaaagacatgttccttacttgactggcctcactccttcctttattccaggattggtgctttgggatggttcactcacatacccacagtctccaggaatcaaatctctttgactgtaccttagagaggcttggggagagaaccacttcaaatataacaaagtatagggacccccagcctgaacttagtgaatgggagatagagcaacaattttgatttctttgagccaagctcttggatcagagaccagctcaacatttttctcttggatttgaaaaacacaatgacctcctgaattctctgctcaaaactctgaattgagtttaggtcaaagcagctttcttaacgatcacttgacatgtaagcgtattatttccttttctggccccgcaaacccttctgaaccagatggagacactcttgacagattctctgacagtgtggtctttattcccataatcctgcctttttcctatttcaaacctggttgttttcttctctatcatcgatcccttatttaatcaacttaattggatggcacttgtttcccataatccttccctttggcttagaaactctaagcctttttgattttgtgttctttctgtgagttaattactaactcattatgaatacagattttcttttaagagagagaaacaacttgtagttaaattgtacaaaagtaattttatattttgacacacttctgctttaagatttagtttgcggcataagccatggagaagaaagttgaaactcttgcaattgcagcttcataggttaaaatagtagcattttagtaattttgtagctttcatcttaaaacacaactgaactgaaaaaaaataggtggttgtctttggacatgagaaatgagctcatgagaggggctgaaattacagccctatgtgcttctgggtcagagagcatgctatagctcacaccaaacacagggattctgggatattctagagaagttgaaggactagatataagttttactaaagccaggcactggaatgtaccaccggaggtccttttgaagcacagtggattgtgttctggactaggataggaaaagatacggaagcaacttccaaacactgagaatgaagaaaaacaaaaaaagacaaagaaaattaaaacaaaatccatccaattataaacaagactccaagttagcaactacaaacacataggtaaatctaatgccaagaaagacataaattcattagaaatgagatcaatttatggtgaattgtaatgaagactgtgaagatgcttatcacattaacccttataaatcttaagattttgcagtgtcttttagacataaaatagttaaggacacagacaacacatttgccttcgtatgaattacatgaatattaattacaagcaataagtaaccaggtaacaagtggtctacttttagaccaccactccataaccattttaataaggagggttccatgagccaaagagcttgtaagatgatggcagtgggattttttaaaaaaatttacctcgacccctgttcttaattaatttcattattttagtctaacagaaactttaagctgtttctatttaagatattcaaggagaaaaagaaaggcatacatttatcacaaataaagaactgtaaagccaaaatagcaaaatctaaaacgaaaaggaatgagtaagaaagcttggaaacagaaaacaaacaaaagtctttgaaaagtaaacttgcatccttgcaggggtaattagtgaactggaaggtagcagtgaaaaaatttattcagaatacagccctgagtgacaaagggctaaggtcacaggcacactgaggagacatgagtcacagaagaggaccatgctggccttagatacattttaacagcatgcatccattcttaaaagctatttacatttatagaaaatctacatatgtagtaggattatgtaaaacacgcaaaagaataataaatgccagctttaggaacccttccaaagcaggatgggggagcttggggtgaaaagcatcaccttgccgccatctcgtcatccctcagcttcatgttttcctccttaggaaaatacttccgaggcgggcaggtttctctgacacacacacaaatgcagtctttttgctacctggactttcactgcatgtcattaccagtcttctgtaaattaccagagaaatatgtttcttatagctattttccccaaaatattgtatgtccaaagaaatataataaaatgctaagatttattggcatggtatgaagggtaacagcctccattttagtcctattattgtatctttttgtcaaatggagatagttcatgtaagtcaatttatgaagtacaaattataagaggccagataattagcataagtgttttgagctctgtatatatagacaattgctcctcttggacatgcgtctctgaatctctctggtgcttagttgtgtcatctgtgtggtagctgtaatctaccacaagacagagcaagatggcagccatgattcccccacccgcaaggcatgccttgttacaggtacatccaaataatcatgacagtgatgcaagtgctaaatcggcaaattggcttcacagggctaaggattgaaggggtcatggagaaggctgtggctttacatggtgaggaaagagccaggaggccattggtgaaggtgcagcctagaaaccctactatattggatgctaggacatgagatgaccactaaggacagcagcagccagcctgagcctgcgactgtgtattgttgggagagctgaagaagcaggcctgccaaggtgctatggagcactgagaatcatgaatggtgtctcggaagtcaagcagtgaactttttacactgttgaagtttgattttgctttcatttgatgacaactatgccttggttcttccttctttgagtcataacgtttgcaacttattttttattttactgttgcccactgttgagagacttttgtcttttaaggagacattggacctttaaagaaaacatgcatcttttaaagtgtgaatttttttttaaagattgtgggatctttaaagttattttatgttctattttgtgatattaacttgacattctgggggcaaacaagaaagggaaaactcatgctttaatagtggtgtgtgtgtgtgtgtgtgtgtgtgtgtgtgtgtgtgtgtgtgtgacgttaacaaggggtaacttgtgtttttatcaacttcacacaagctagagtcatctgagaggaagaacctcaattgagattagcatacaggcaaacctatggagcattttcttgagtactgattgatgtggaggatcaccccccacctgggcactgtgggtgatgccatccctgagcaggtggtcccagacagaaaacctaccaagcctggaatagcaagccaatgagaagcattgcttagcttcagttcctaccttcaggtttctgccttgactttctgaccagacttccctcatgatggaccataaactttaggatgaagtaaaaactttcttccccaagttgcttttagttatagagtcttattacagcaatagaactatgtaagacaccccctatacccatactccagcttatgacatccccagccatgggcttttgacaaggcttacagtatccgacataaattctctcccatgtagaatcaaatccaatcagaaagtggttgattccccataaaaagccattccaatattgcacctgtgggaacatctttcatggcctgctgggtaatatagcatgaaaagtccactcttgggtgaggtcattgatgacctttccagtcggcagcctgcatatcactctctggtactatgaaagagctagacagcagggaagcagtatccaggtgagttccattgtcatttttctatgtcctacaactgaactgtgttgtgtccagcaatgcagtcttcccatctagctatggaaggtggtcaagagcaatagcaatagcctctgtcgttttggaggcctttggggcctccctcacctcctaggatgatctcctacatctggcatctagattttcatctaataacccatgccttcccgggggcagggtacctctgtttaaactttccacccatgttcattgctgctctattcacaatagctaggaaatggtttctccctaattatgcatcattaggtgatgaataggtaatgaaaacaaggtacatacctacaagggaatattagctgtaaaaaaaaaagaagtgaaattattagattcttagaagagtgatggaaatggaagattttctagtaactgaagtctcctgggcccaaaaagaagagtgcttcacattctcactgatatttggatcctagctttgaatttttagatttgtgtgtttcatttacagtgtctttagaggtcaggaaactagaaagtgcccatggcgggggtaaggggaagtgcggagaaacctttggaagggagaagccagtagcaaagataaaggtgggaaattctggggctaaaggtacaagcagagatgagagccgttggacgggggagaggtggtagggagtgagctgaccaaaactacaaacatacgaagagagttatgaaaatacgttacttggtgcactaattacaagtaatgtggaggaacaaaagaaaaaaaaactttttttccatccacttttaatgactctctgaaacctggccacagatttcagaggtgcccctggtttaacgttgagaattcctgcactaggctgtgtcacttgggtctgactcaacattttaactcctaagcttgcatacttgctgaaggaagggccgtcctcctgcttttgcttgttctcagcgcaagctcatggaatgactgagtgagtgctgaggacaaggcagccagcaaagtcagttccagcagagcgcccttcccaggccagttccaataaagatgctgttttgggtgaggtctttgcattccactgaaacccacagagtgcctcacacacagccaacctagagtacatatttcagtgatgaaatgtctcttttgggaaagacagaagcaccacctctaattaagcaggtctggggaagcagagatgtgaggcttcctcaagccagtgagtgtccttgtgtagccttgcttctgcttctgtttcctgttgtgtggcaatagaagcccccatgagagagcataaggtcctatcccccagcagattattctaggctctcaagaataccaatcaactgagaggtcatccctaaatggagaatggttctaacggtgcctttgtataagccagcactcactgactttaaagaaaacacagagatggtcaaaaggagatgaattcacaattcagtgctttaaaacaaaaatcccaacatattagctgtgcagaagccaacatgcattttttggttgcagatactttgggttaacaatggatatttttgtaagtgcaatagaagtgaatttactagggggtggtaaataacacagggaaacaatataaatttaagggggctgtgaaacctagtcgttttactgtgattgcacagtgtaatcaagctatcaacattatgacaatcaaatagtcaatgggttctggccaacacaccttacctataatgctcactgtcattctaatgccaaaccaaaaaatgactaattatatattccctgggtcccgatgccttgtaagtaatgggtaaggtctagagatgcttttttggctctgtcatcaccctctaattatccttcttaagctctgtgggtagacactttctcataagctaggcaaggcaatagaatgtagattcaataatggaagaaaattatgtcccttctcctttatctccacaaaatttctgtcctttctgaaaatgtaggttctaggaaccaaacttggtcctcaggaaggggcaggatctgaacttagttgctagtctaaggtagcttttgcttcagtaaaactgtattaaagaaacccattatcaggcaggcctggcggtacaggcctgaaattcttttgacagagcaattcctatgtaacagattccactcctgagctagtgtgctagttcagatctcagctgctcgacataacacaagctaacttctaacccatactgatctatatggtaagaagggctggaaaagcagggtacactccacagagccactcagagacccaaccccacagaagcgctgccatctccagatggcttacaaggttactctgtgtgtagcactgtgtgttatagcttagaaatatttctctgaatttccagatcatctggctagcttatttcacataaactactcagcaacattaatgagccaagatattaaatggcattttcatttttggtgtttttgttgttgttgttgtttgttttggtttttgagacagggtttctgtgtgtagccttggctgtcctggatctcactctgtagaccagactggcatcgaactcacagagatccacctgcctctgcccccggagtgagtgctgggattaaaggtgtacaacatcactgctcagcttaaatggcatgttttagcaaaatacatttcaagaataatttcattttctctataactttaagactacacattgaaaaaactttaaagagaagaggttccagattaaaaaaaaaaagtaaacatatcctgtaagaccatggtggatggtgattaagccaattgcccacaggttggttttttaggggagcattaactgtgagcttccatgctttggggcctcagaaaaggactgaagacagttttgtcatagagcatataccacaaatcaaaaatgtgaattttctaaaaatgaggtcaagtggaaaaataaaaatagaacaaggccaaagggaaagctgtctgcctctagtcccttagtcagtaactcccaaactggaaacaaatgtctaaatattcagcaaatgctagttctctgtaaacattttattgattttcaaagtgattgaagttgagacacttgctggcagttaaataggacctaaatctttccgtgcatgtctatcaaggagatctgatgacttcaaacttcagtatccttgacagcatctcacagtcactaaaacagtgagctgagcatgctgcttctattatctagcatctttgttacatgatgacagaggacaatttgtcatgctggcagacaaatgaaagtctacacctcttgacctttttgtttttaataagtagaataaaattatagctggcttgtgtgaaatctttatgattttattttaatcatagttttaatttacatatttaaaatcttaacacttaacttacataattttattttcttttttggccaatacatgtaaagaaggttgaaacacaacttcccatatatagttctattccaaagggtggggaaacactttggaaaaaaacaatcagcagccagttctgtgtcatataacttttttgttaatatctgagccccgataaagaactccagccttcagattcaccatccatacattgttcgagaaatcattcttctgtttgtgagtattgtcaaaaagataccaaaaaaatcacttgcaggtatttggggaccagggaaatccctcgactagaactacccaggaggcacagctcttgtttgtttttcctggggacagagttcctttatggcatcttgcttcctatcacattgatagtacgaggctgactgaacatttgttccttgcttccaacctgcttctagtcattctccaatcaaacaaccccaagtagaaatatgacagggttagaattactggagtcacgaatgcttttccccgctcaacggttttcgtttggatgccatactgtgatggtgattgtcactgtgttccctacaacaatgcaattatagtaagcatttggcctggtagttattcactcatgaggccttgctgtaatcatgacaaaggcaatggtgacagcatctgttagcagaaaaaaatggtgtgttaactcacctggtagtcaatagtagggctgtttctttgagtcctgtatatactgctaacatctatccccaagggggagaaggccttcttactctcttgagtcacagctcaccaatgaagccctgttaagatttactacacagatagtcttgcctgtctgtgtcttctctaaccttcctgctagtcttctagtttgggccacggtcatctcccatccagattatttaacctgttacctctccagctctttcaggctccgtctttaatcaataatcacccagaaaagctacctttcaaaaaacgctgtggtcatatggctcccataatgaaaacctcaatggcattccttgtccccagggtgaagagcaactgctcacatggtttctgaagctcttgataatctgaatactgctcgaattggacctctttcccctcatgtcccatagtccatccctgatgctactcctgctttctcttcattccctgacccaattacatggtcctcacctctgatgtttacatttcttgtttcttctactcattctctcccctacaacttggctatagcatcaaataaaataagccccattccacagcctggggtaggtgcttctcccagcaatgctaaagcagcccacgagttgctatcactatagcacacttctccctgtgttgtaatttacttgtcagcaccaacctctgatgggggttgcatggtgaaaaggaaaatgtattgagtgaaagaaagcctccccaagatatggataaaatatagatgaataccttgacctgagcatccagcaacaagttacagaaattcacccagcaacagtagctatgaaagaaaggtagcatgactcagggggatcagtgatgagggcttggtcttgcttctgccttctgacccatcattcaatcttagagaaggtatttagtcttcctggatcttagttgctttgttttgttttgtgctgtaattgcagataggacttcttccactgtcaccattttaaatgaggttgaattaaaaatagtacataataaagctcttggcacagtgcctgggacacccatgagacaactcaggagtttcccttcccttccaaaacctaagatacatggaaggagggtgtgagagaggattgaacagctatactaagattcagaaggtggtgctggatatggagcagagactaggctaagaaccacttttagctaaggaggaatcaagggacctagtccccaaaattgatccaccctgcagactggagctcatgggtctgttgggggtgggggtggggaatggtaatgttctccaggacatggttaaccactgcagtgcctgaactccaagacacttgcgggcgggtagaaaggctgctatgatggtgtgtgaaaggctctgaggtggtggtagaggacactttaatggtcaggtaatcacctgaggatactgtttggaatacaattctgattcaaatccctggggagggcttgcaagactgcatttccaacaagatcccaggtaatgtctaagccagagctccatgtaacacactttgaatagcaaaaatgtagagcatagccacttacccccactgttaatgatccgataaatgttagcttcctaatagtattgtgtacattgaagaaacactgtgataaaccacctgggtttgggttgaagcactcaccagaaagttatcttgaagtcatgataagtcatcttaaattctttttccagtgggggaacctttgactttagggacttttgtatatttatcaggatggagaagggtttgtagaagaaaaggaggaggaggaggaggaggaggaggaggaggaggaggaggaggaggaggaggagaagaatggctctgcataggaggagaatggagctgggggaggggggcactaagaagtcatattggagaaatggtcatgtgatatttcaagtcacttgcttggtaatatgctcatctccttttatcccttcccaggagtccttgggcatgctcaccaatgctttggtacatgtaattcatttctttgttctctgcaaggggtgtgggattgaagagcagcatcacactgccttgaaggcctctgctagcttctcttcagcagctgctgctggtgggtaggcaggagtcgtgggtgggactccatttctattgttgagcaatatgactctactgctacccaaatcagcaattaaagcaaagcgcaataatgggttggcaacaccacagggaaagacagtgacaagggagacaagagaagacgacgcttggagaaggtaacgagtggctggagcacccccatagaagagagggagttacgaggtcaaactgtatcagccacatctaggcttgcagtagttcctaaccatagcacagggaactagcaccagctttacaacagttttaacctgggatccacaaaagggctttaagaggtagtgtactgctttgtttttgttaccttgaaacaaactagagttgcttgggaagaggcaacctcaacccaggaattgccaccatcagactggcctctgggcatgtctctgcggcactttcttggttgctaattgatgtaggagggcccagccatttgtgggcaggtagtccagggctagataagaaaagtagctgagtaaactgtggaaagcaatccaataagctgcagtcctccttagttcccgatttggctcctgactccaggatcccatgtgagttcctgatctgaactctcagccatgaactgttaccagggagctgcaagatgaaataaatctttttctccctgtcctggttaggtttgtgccagcaaggtagagttatccgagaagaaggaacctcaattgagaaatgcctccattagattggtctgcaagcaagcctgtggggcgaagatattgccagaattatgtcataagtacaccagtgtcttctttctgaataagttgttacccagggtcatctgcccacctgaaagaattatgcttttcctggtaagagcacaggagacttaatagcagaccaggacttaatggtagctgtggccctgtgatgtccccttgacctacccatcaaaggtgtgttctttggggatgggcctaatgactggtcaatactggtggacaaacatttacatcctagcatcatatattttgcttatctctaacaggcccaggtagcatactgcttccatttgtggtatttttggagacagcacctctttaggtaaattctacatggcaagatttaatttctcataagcaagtctactaacttactattagtaacgtcaattctattgcctcgagtttcttcggcatcaacctgggctgccatgtagccagagttgtgtcaagtgcctgctggaaaggagtcaccattctcataatatacccttcatataggccttttccagagccagttagagtgttcccaggcctttctggaaagaaaaatgtcacctttcaagacacaagtactggtgtagttggaacaccctttcctttggttgagcttgggtggtagataccaccatatattcatactgcttgctggagagatcataagctaactacattgaagggtcacaaaaccctgcagggagtgataatgggaaatagaaaatcatgccagtgtctcaacaaagtaatccggctaggcatgcagctcatgtgttttaggggtcacataaataatgtcaagttaacaaatagatttgcattatacttgcaaaacagtgtctttcaaaggaaaagatgtgattgggatttaaaaaatggaattactaaatatttaccttcatgggaataatttgtaaattcatgaacgtggcctatataaagccctcaacattaacctttagcagattgcctatgggcaagagctgcccactctgctcttaatgagcaattaggaagcattgtatacagttagagacattcaggaactgtggttctgaattttttaaatcagcaattagtcatctgctggatatttaattcaagaatcatattcagagtgctctcccagaccagactgattaagtagctaattatagcactggctattgtggtctccaagtgtagagatgctcacctcacaatagttagaggtggctatatttggtagagcttagctattactgtgacacagggacagctcaatgaggttgtactcattcttgtttgcagtgagaggaatgagaagcatgcttgcataagcccattcccagtaaaaaatgaacatagtatcagctgcgatgaatcagattttccttaggaaaagtgagtcaacgcatgggcagacttttctgagaaactctggggtggggcataaagctggccccgtggaaggctgtaaattggttctcacctgcagtcaactgaatgaaaggtaaatctatattccaccctctcagaggccctctcagagacccccccaaactaaaacctgaaacatagttttcctttgcttcttcaagaactacaaccacacataattcttctcttttaaaagcattcgccccaaagcctactaacttccttgataaaatagactgaggacagacacattttttaaatcctttagtccttgagacagggtcttgtctctgtttcgtattgctgcgataaacaccatgaccaaaagcaactgaagcggaaaagagtctatttcagtttaccatagcatcagccagactgactgttttgtttcagtgacaggcggcctcgtccagaaaagaaaaataaacaaacacaaattgtgtaacttaacaagactttttgtatttgttacatagattttaataaagattttcttctaaagcagatactagaaatagattaaattttattcagtttttcctaagtagtcaaggataataaatgagaggacacaaatgctttatgttaatcaaaatccaatattttaaaagcattttaaaatgaatacataaaaatccaaatatgattgctttgggagattttcctgatgtatggaggctatcaagcattagtttggtgatatataactatagaaataaaccaaaatatctctaaatgttttcagattattgctgtgtatttattttctaggaatactatgtgggatttttttctttttattattattattattattattattattattattattattaattcattagggaacaggcttgtttcacatgtaattcccctctccctctccctcccctcacccccattccttctcccccacctccaacctaccccccaccccatccacccaccactccccaggcagggtagggcccccaaccggggctccaccaagtccaccaaatcttcctgtgctgggcctaggtccctccccatgtgtccagagacagagtgcatcccttcaagtgggatgggctctcaaagtcccccacacacaccagggcaaaaagccagtccacctctggaggctcccaggagtgcaggggcctccccactggcatccatgatcagggggctggatcagtcccgtactggcctcccaaagagcgtctgggtcgatatgctttccctttttcaggccaactctatgtgggatttttaatgagactgtgatacacaaaaatttatagatgtgcatatggttttcaaagagctttatgttaaatttcctttttatgaaggggttacaggagatgctaacttctctaagcactaactgacagatctaggtgagatgtttctattgttctgtatgcagtacacaaaggaactatgctgtcaggccttaccaccaagagggaaaactgatagcctagatttaaagggtgattaaattattaaaatatctttgtttaaatgctcagaaaatttctacatttttttctgtgcaaacaaaatataatttaagagattaaaaatgaagagactggtcctatatgcgggcaaatttttgcatggtctctgaggtttgtttcatataatatatattccatgtaagaatatatgtttttatatcatatattatatgttgtttttatttaacatcatatatttctatataacacatattggcataaaatatattattgcatattatatatgtatactattatatattatacgtataatgtatttatagattattacatacataaggttggtattaaaatgggctaaattagctattgggaccataaaattgcttttcaacattaatccactgctgatagataatacatttttcataaagaattctgtatactagatattttaatatttaacttcatatatacacacacacacacatatatatatatcataaaatttttaagattaaaccagtattgctctcaaaaaggcaaagttacaattagggtttctatgttcattgggtcattacatcatactacatgctcatttgttatggaaataatataatactattaaatatgtttctggcaatttaaacatgaattattaaagtttttgttcattttatttttatttttaagttgtttattagaatatattatatattataacaggtttcatcacaacattttcatgcctggatataacgaatttttatcatattcattctccattgccttttcttgtccccttcttactcttggcgattttcttcttcccaattactcccctgaatactttcatgtcctttgggttttgttatccaatgaattaaatttcggttgtctacagaagaatgggtgaggggccattgcaccttgccaatgtccacagcactgaggaaaatgtctgtccctctttcagcaactgttaactgcctactggtgcttcatgactctctccactatccatgaggagatattgagcaacacattttgtgcaggtcatatgtatataataatagttgctgtgagttcaagaatacatttaccgtctcatgtttggaaaacaagattaatgctctattccttcttccagctcttatattttttccacttcctatcccatgttacttggaagaaggtgatattgctgtcccactagggcctagccttctaaataacgtattcttagtgctttgacctgttatgactcccactgtagtaactgatgccccctgtaaaaagaagcttctgtgaccaagaagacagtggcgttaattcatgggcattcacatgaatggttagaaggcaatttgacaggcacatcacatccacttagctaaacaacagcagtagcttctacattcatgcgtatgactccctgtgccatgggcttttaactggtttatagtatgagttctctcctgtagagcctgccccagatccagtaagaaagctgttgataaccccttaacagacttgtcattattgcaccattggacacatcttgtctggaaggtccatcatatattattcagggtcacagctgagcaaggcagttgacaacagttttctagaagcctgcgtaatactttttggcactaaagaggctagacaggaagcaacctttaagctcagttccagcttgatttctcaatgtactgaaaccgaagcacatgtgtcttcagcaattgggtcttaccatctagttctgctgggtgaccaatagcagtggaattaatctgtattgctttcggggcttcaggaacctctccaaacaacaactcagaggaaggttgtctaccccagtgctggagttttttttaagtttactttttatgattctcatgtttttatgacgatcaacacacataattctttttatgacaaaaatatccatgttgtgctgggaagataggtcagtgggctaaggcgcttgtcgctcatcctgatagcctgagtttgacctctgggctcacatgggggaaggtgagaacaactcctgcaagtcgccctctgacctccacatgcccactgagcacatgtaccatatcctccccacaacacacacacacacaaaccaatcaatgccattaaaatgtttaaatctatgttgtcaaatgatattaggttaaaaaaccaacagagaaaaaactttgatttggggctggagagatggctcagtggttaagagcactgactgctcttccagaggtcctgagttcaattcccagcaaccatatggtggctcacaaccatccgttataagatctggtgccctcttctggtgtgcagatatacatggaagcagaatgttgtatacataataaataaataaaatctttaaaaaaatactttgattttcccacatcctaaaaatgctacattttaaataaatatgcatctctacatctatgtcttgtctaaagtattatatgaggctacacattcaattttgagcttctgaaaatttcatgatggaatgatatttgagttatagttaaaattcttggagcaaggaagatggctcagtctgtaaagtgcttgccatacacacaggaagacctgaactcatacacccagcacaatatcagaagctgggtctggtgacatgcatctgtaatcacagcacagaggaagtggggatggaaggatccctaaggctcactgcctagccaatcagtaagttccaggctcagtgagaaaccctgtcttaaaaacacaaaggggacagcagttgaggaagatccctgatgtcaaactctggcctccacacacacacacatacagaaacatgtatgtgcccccacacacacacacgcacacgcacacgcacacgcacacgcacacgtctccatacagttgaatatgtacacatacattattaaaatcaaacattctaactctgttttatcttttacttatcccaaagtcaaacaaaaaaatagatgatttaatggaatatatatatgacacatatattagaatatacactcctgggataacattatcttgtagcaatgtgaggattatactaaaagatatacattacttataaaaagaatacacagttataagatgcttataaaaataaatcttataagatttgtatgttgcttatagccaacatatttttataatgtttatagtcaaagatactgaattttcctagaacattgatataattgtcataatatttgcaaaagggctagcttgaaaatataataatttaatattttatgtaccctgttaactttgtcagggttttaacagaatcaaagctcagtgaaatatcatttgggataaaatatctttaaaagtattttatatctcttgttaaaaaaagggctatcacatatgaaagatgcacataaattcctggtaatatgtccatttgtgatcactgaaataattttcaaaaacttttagtaggagtgctaggtagctagttagaaattagtaggcttgaaggtcattggggatgggcttctccctcataagcccttttaggtccacccccctgctccctggtaatacttattataagaatagagaaggtatcacatttgtccctccttaataattaccatactacagtgttgcaagtgacttttaaaaaataaatcttgagctaggggtatggctccatgagtaaaaacagtagccatacaagcatgatgaccagaattctccaaaacccttatttgttgttgttgtttttaactctttgctctttactctttttttttttgtgtgtgtggggggtgctgtaaacccagctcccaagacaatcaaacagaggcttattctttcttaaaaatgcccggccttagctttactttttctagccagcttttcttaaagtatcccttctacattttgcctctggacttttatctttctctattctatatacctttcttatcttcttactctgtggcttgctgggtggccgggtggctggctcctgatatcctccttctccttctccttctcctccttctccttctcctcctcctcctccttctcctcctcctccttctcttcctccttctccttctctcactcctcaatcttctcttcccagatctcccctcctatttattctctctgcctgctagtcccacctatcttttctcctattggctgttcagctctttattagaccaatcaggtattttagacaaacaaagtaacagcctcacagagttaaacaaatgcatcataaaagaatgcaacacatctttgcatcattaagcaaatgttccacagcataaacaaatataacccatcttaaaataatattccaccacacatatacatacatacatatgtacacacacacacacacacacacacacacacacacacacgcacacacacacacaccagatgcaatggtatatacctctaatcccagcacttctgtagtgaaataagaggtggggactggagaatgcagagaagatggctagccagcaaacctagagtaagcaatacagtggtactacagtagcctcaggctattgaagcttaggactccacctcctgtttccctggaaaatatcagcttggttttcctttcctagaagaggctacctagatcagggatcagaagcctcctcagaagatatacattgtaaggatgatgacagtcaccaagtaccagaggtgtgtttcatggaatcagatgcgttttatgaaaactgccttgaaaaggcaaaaggatttcctatcctctgagtcactggagaaacttgtgttctgttgttttcaaattttagataaatacaaatctggtagagtatctgaatctcagtccatcccacatgcacaaacatgcacacatgcatatacacatacatgcatgagcattcgagtgcttgtacatgtgcaaacacctactttccctgggagaattctagcaatcagaaagttgcttgttgctgagcgaccatgaaaagtgtttcttttttcagataatatggaaaaattcaacagaaacaaggtgagagtagaggtctagaattattagctcaaaaggaacagagtcaaagtcatgttaatcaggggatatacctttacatagatgagacaagcctactttggtagaaatgtatcccctcacatttggctgtctttaagtcttttctatttttgatttaatatctattttgtgagataaaagaatagcaacacttgcttgttttctagtttattctgtgttgaataactttttctgtcctttcactgttgtgtctgtttttatgaggtgtgtttcatggaggcaacaatagatgaatcttctgtttttaacacaatttgttgatttgtatatcttaactaggatttatatttaattaagagttattattaaacaatattattctttgttaactcctgctattgttgattctgtagtttgatgttctgttcctcttttactgaactgctattctagcatggtgtgttctttccttagcctcatggacatgtttatctttctcttcagtctaaacgattccttcaggtatctattgtaaaaccggtttggcagtcatgaattctgttatcctgtttttactatgggaagtttttatttctccttaaattatgatagataggtttgctgggtataatagtctgagtaagcagttgtatttcaaaacttggcaagaatatttccaagtccttttgtccttagttttcatgccacacagatgttttaaatgttaacaaaaataaacaaaaatccttgaaaatatattatcagaaggaatgaaagtaagcatcaaacatatagctctggtgaagcttagtcaacttcttccatgcatgatgtgtcgtcatctccttccaggggtggcatttcttcagttacagcagcactggtatcatccacagtaggatcatcctcgtcaatacctagaccaagcttgatcatcctgtagatcctgttaacatgtgtctggggatcttccagactgaaaccagaaaacaggagtgcagtttcatacagtaagatcaccagatccttcacagacttgtcattcttgtcagcctctgtcttttgtcgtagggtttcaataatggagtggtcagggtttatctccaggtgtttctttgctgccatataacccatcattgagttgtctctgagagcttgagctttcatgattctctccatgtttgctgtccacccatatgtgcttgtgacaatacagccaggggatgtcaccaatcggtttgatacaaccaccttctcaacatttttctccaaaatacctttcataatcttgcagagattttcaaatttggtctttttctcttcctgtttctttttctcctcttcatcttctggaagttccagtccttctttggtaacagacaccaaggtcttgccctcaaactccttcagctgttgcacacagtactcatcaatgggctcaatcatatagattacttcaaagccatgcttttggagatgctccacaaaggctgagttagcaacttggtccttggtctcacctgtgatgaagtagatgttcttctggttttccttcattttgcaatagtccttgagagaaaccatctcatctccagaagcagatgtgtagtatcacaacagttctgaaagcttcttcagattttgagagtcttcatgaattccaagcttgatatttttgagaactactcataaaactttttgtagttctctttgtcttctgccatttcagtaaatagttctttctgataactttcaaaattttgctttgctgcaacatttcatgagaaatatttagaggaagatcctcagaatccaccactcctctaatgaaatttagatactcaggcattaactcctcacagttatccatgatgaaaactctgtgcaatacgacttgatgttgttctttttctttctgttttcaaacagatcaaatggagcatgtcttgggacaaagagaagggcccagaattccaattgtccttaaacagaaaaatgcttcactgccaaatgttcttcccaatcgttggttaagttcttgtagaactctccatattcttcattagtaatgtcatcaggattcctggtccaaataggctttgtcttgttgagctcttcttggtcaatgtacttcacctttttcttcttcttcttcttcttcttcttcttcttcttcttcttcttcttcttcttcttcttcttcttcttcttcttcctcctcctcctcctcctcctcctcctcctcctctttttcttcttgtcgccatccttcttttcctcctcttcttcatcagaacccatatcttctatttctggcttgtcatcggagtccatctcttcctctttatcttgtttttcttcagcttcatcatcactgacttccttatcgagttccttctccacgaagagagtaatgggatagccaataaactgagaatgttttcttcacaatctcctttattctcctttcctccaaatactctgttcttctttcaggtgtaagataagctttgttccacgacccattggttcacctgtgtcagtcctcactgtgaaggagcccctggctgaggactcccaggtgtactgctcatcatcgttatgtttggtgatcacagtcactttctcggcaaccaaatatgcagagtaaaacccaacaccaaactggccaatcatagagatgtctgcaccagcccgcaaagcctcaagaaggctttggtgccagacttggcaatagtaccaaggttattgatcaagtcggccttggtcattccaattccagtatccatgatagtaagggatcgatcttgtttgttgggaataagattaatgtgcatctccttcccagagtctagcttactagggtctgtcagactctcgtacctgatcttatccagagcatctgatgaattgaaggtttattcttaacttttatttgtttgttttgtttttggagacagggtttctctgaattgctttggaccctgtcctggaacttgccctgtagaccaagctggccttgaactcacagagatctgcctgcctctgtctcccgagtgctgtgatgaaaggcgtgcaccacctggcatgaaggttttattttttttcctttaaaattgtgtgtgtgtgctaaacactgaattgagctctggaactcaattgcagagagggaggagtgaagagcaaagaggtcaagaccgggctggtgaaacccacagaaacagctgacctgaacaaggaggagtgcatggacctttgactgatatctgggaggccagcacgggactgatccagacccctgaacgtggatgtcaatgaggaggcctcggcactctatggggtctctggtagtagatcagtatttatccctggcataagaaagggctttgggagcccattccacatgtaaggatgctctctcagcctagacacataggggggagagcttaggccctacccaggatgatatgacagactttgggggtcccccatggagggccttaccctccctggggagaagaggggggatgagatgggggttggtggaggtgggggagatgggaagggaaagagagagggagaagggattgacatatgaagcaggcttgtttctaatttgaactaataaaaaaatagtgtgtgtgtgtgtgtgtgtgtgtgtgtgtgtgtgtgtgtgtgtgtgtgcaggtatatgcaggtattgggcaagagcaatatgtgctcctaaccactgagtcatttctccagacttctagttgcatcttcagaatctcttatgcacactatatcatctgcaaaacaagggtattttaacctattttcctacttgtatcacttgttttattgtcatggtgttctacctgagaatttcagaactatatggaatagaagtggaaacagtaggtggccttgtctcaattttgattttaatagtatttctttgaatttttcttcatttaggaaaggattattgaatatggatatggttatgcatacatgcacacatatatatcaaatatgtatatgtatagatatagagagatagatagtaaaaggagcatacctcaatataacaaatgattacatatgcatatatgtgtacaaatacatacatatacacatatatatatatataatttataaatgcatataattatttattatattgaggtatgctccttccaccaccaaagggtaagtcaatgttaagataaagcaaataaaaaacaatcacccttaaatgctaattatttgaggaagtaaatgaatcttggtatactgtgtacactaatatcaataatgtacattaatgaattattataggcagaagtagaaggaaaaagtacagcaagactggtgactagacttatacagacagagggaaaagtagaggaggggaaaagggagggatagtagggatgaggtggcaagaaatgaggcaggttttgctcaatgtagaatgaaaagagataaagaaatggaaccagatgacttgatgcagtcctatgtctcggagaggtgagacatggagacctctaaactaggccagcctatactctttgggaaagcttttcaaaaggaaaatgaaaaaggaaattatatagagaaacaaaagaagatgttgagggggtgggaggaggtggcctgagaaattgccagttcttcccagacttttagattcctgccacacctctggaagccttttgcaaggccaagtcatggttctggcagtggactacccttcacaggttgggtcataaattcttttcacatctctgggctatccctaggggtcagattttgaaaactgtcttggtggtcctttgtgaggtcacagatacttattaaagtttgaatggggcagggcgttggtggcgcatagcacttgggatgcagaggcaagcggatctctgagttccaggacagcctggaccacagagcaagtcccaggacagaggtacacacgaagaaactctgtcttgaaacaacaacaacaacaagaaaaccctttgaatggtccttcagctgcaaattctgggcctgggcctgggtcttccctcccattctggaactgcttcttggaacctgtgcccatgttgtcctgcagactctggctccaaccagggttccatcttgccaaatattggacagctctgattcagtttctccctcacaatctaggagtatttgactggctgggttttgatggaaggtcccataacactttctctgaatttccagagagtagaggttcatgggcagcctgctactgctgattcaccatcccagaagaaaccatttaaaagatggaatctgtaactatggctgacaatacataattgcatacttcaatatagctaatagcatctgagtgttcctggtagcctatttttcttagaagttttcatctatctcaggctggtttcacgttcacagtgtagcaggagacaaccttgaacttctaatcatccacttctttcttcccagtattggatttttagacttgggatcacacccagagttctgtgcatattaattaggcagtcactgtatcaactgaagtgcacccccagtctggaacttggatgttcttaataaaataaatgacacgtgtgtgtgaggttactaatgagctggtcacaataaagcctgtgtatgtgttgaaatataccaacaaaactgccgctatgatgtggggtctccctggtgtccttcttccttctgccactgtcgtgtgccactgtcatctccctccattccttccttccccaaccccccctttaaaatatctgttactaagagtacagtgacaattttctgagactctgtgttttaagtgttgttctggacacgcccatttggggctgtttttgaagaacaaattatatacagacagaatttgtggtttgaactctgaaaaatctacttaagccatttcttgtaggtagatgaagaatgaggccctacataatgtgaattgctttgctcagtgcatcctaagattgttgaatgcttctgctatatctatttttcctcctttaaatgacatgttctacaatttggaataccttagagttcactagacacacaatgatctatcatattgaagtagaatgagaatgaagtagaaaaaccaatgattacacactgatttattagtgattgcctatttgccaaacatggattcatttgctacctcgagcagaatgacctggagaaacagctgaaaccatggggcattgcccttaacaagctgctgactgccaagtacccaaatatcacttgtttgtctgatcctccatgtggtttgagagttcaaaatgagaaagcaaatgaacctgtattgaagccttttgggagctattctgacttcagtattggagtgtttgttccagaaagattcctgcaacaatgtgtacatgctgtttcctctccctaaaatgtctcttcttttctaatgaaaaattttaatttgcctatgctttggcccattgtaacatacagtgttaactcagaatgtgttaatggaatgaatgactgtgaatgaatgaatgatggctcctttatcgctccctccagttagtttcttccttctgtctatcttggagccttctaatatactttccttgttgctgtggtaaatacctggcaaaatcaacgtaaaggagaaagctttcctttctttggttcacagtttgaggcacagtgtcctggtggagaaggaaggcaagaggtacttgaggcagctgctcatgcatctgaagtcaggaggaagaaagcaatgcatacaggctgctcagcttcctttccagtgcacaaggtcgggatcccagtgtggcagtcactcgcagtggatggatcttctcactcaaataacaccatcgagataatccccaagatgcatgctggacggctcatctcccacatccttccagattcggtcaagatggcaacactggtcatcatacttaaaagtatcgatcatttcttgtatactctcctgttttgccttcttggttgcctctcttctgcagaaagattcttgatcattggtgctattgcctgccaggataagcacagcgtctgaaatgtagcaaacactcaacaaagtctacctgaatcaactttaaccattgtctacccttgcatatatctgattatctactccatttgtgcggtttagatgttcatcctccattgcaggcatctggcccatgggtttctcaagttttacgtgatgtgatggtcctgtattctatgactacctatgcaggaccaaggagcatattcccctggttattatttctttataattttattttatttgagatggaaattgtgtaacccaggctggctttcagcttctccttccactcctgcctcctgagtttgggagttttaggcctactccatgatcctggctttattctttgtctagaaccttctcttgaaccctacatttttagtttgtttcaagatctaaagagtctttggaaatgtaaactcttggcggactgtatttaacaacaacaaaagatttttgtgtttcagcagcctttggagatcccagttggctcctggccctgagcaatctcaaagtaaagcaagccttcctcacatccagcccttctctgcttgagagaaaagtagaagctagtgcttccctgtatgggaagagatgctgaacgacagcctggatggaggccacagcccagctgtcaggagcctgggttttgggaatatccctgatagtgagtttcagcttcagcccttattggatgtactgcttcagacaaatgactgaacctctttgaacctaagtgatgtcatctggaaaatggaggataataaagaatacctttgttgtgagatatgagcgtgtgtgtgtgtgtgtgtgtgtgtgtgtgtgtgtgtgtgtgtgtgtgtgtgtgtgtgtgtgtgtgtgtgtgtgggggatgtccttctgtatatatgtttcccttattgtttgatgaataaaacactggccaatagaggcaggaagataggtggaactaagagaccaggagaattctgggaaaggtaggcggagagatactatgtaacggaggaaagagtaacaggtctggacccttctctggtaagataagaccacgtggaaatacttggattaatagaaacgggttaacaattaagagagagctagccagtaagaagctctagtcatcggcaacattttataattaatatcgcgtctctgtgtgttcatttgggactgaagtggtggcaggacctggtaggacaagaaaactacatcaacatatatatgagaagccatatatgcatgaacccacatatatatgaacgtatatatgagtccatatatataagcatttgatgagttaaagcatataaaacagtctgcccagagtagacactcagtagttgtgaaagttcagattgactaaggttttcacatctcactccagagtacttactttaatttcatatgcacaagtcttaccgtgtgcaaatgatggttcccttaccttaccccctctggaagagtagccagtgcccttaactgatgagccgtctctaaccccgacaaggagaatcattatgatagaaaaaaaaagtatcatattttcaaaatgccaggtccacagaaaaaaatatacaaaaaactaaaacaataaataaaacaaatacttcatggtaaaccctgatgtttgcttattcaagcatgatatagcagcaatagacataaagaagaaaattaagctttattcaattcaaatgttactgaaaattagcaagattgtaaagggtgaattaaagagaattaaagtgtaaaaaaaatatccagcttctctcaaatgtccattaagtggaatctcctttgggcatcaagggcgatggaaacaaggggctattccaacctggctggggcattctaattgttacatgtgtgcagcaatcagctttctgctactggtccttgcttctccagtgaggccaccgagctcatgccagtctcgatttctgagaagccaagctgcatagattttgctgttttcttgacaaagtttgtgcagttgagaaaggaaagcaaacacaaagtgcagggtccagggaaggtccaagtcagctgtgggagatgatttccaaggagctgggaatattaattaggtggtagtgacaccacctggtcgtcctgggaatcttccctcacatgaaacactgggaaaaaccaaggcacttttgttttctgcttctgctatgttagacgcaatgaaagttacataagaaatacaagggccctccctgaccttgacaggatcaatcacctacatagcagaaaaaatacaactaactttgattctggagattagggatgtggtgtcctgatacctaggcttttctgggaattctgatgaacactcagatttggtatactcgataaaatactcaagaaacccaggaaaccaaagatcatttggaactcatggaaaaatgtcctgtaaggaagagatccttgtaggtctgggtaggaaagcagaataacaacaaaaaagggaaaaacaactatattatatgattaagatttagctcttctggcaagttttttcttccatggactctctggctaattcatcacaatcctaaacaagaaggcagtgcaatgagtgtggtcaagcatccctgtaagcccagcgcttgggaggctgaagcaggaggatttcaagtttgagggcaagtccggctatatagtgggtttggagcaggtcttgagtacttgggaagaccccattgaagcacttatctaagttagtctttaatcaatagaatcttgggagtcagataatggtgtaaaaacctgatgtatccacagagcaataatgaaacaaacagctgaccctgcctccccacacttccagatggaagatgcccacaaatctttccaagcccctccctattcttccctgagtatctctatcctaatctggatccacaaaacgactctatggttaattccggcctgttgaaagttaactccaccctctgattcaaggtttaacttcattgccagtctagagagtgccagagtgtaatcaaaatatcccacaacaccctgtctcaaaagggagaaaagattgagaaaaacaaacaaacaaacaaaaaacagtactaggacaatggaaacaaggggctagtccaacctgggtgggacattctaatggctacatgtatgcagcaatcagctttcagctactggggaaaatgcctgagattatcagtttatgagaagaaagcatacattttgacttacttatttcagagggcttagtccatgctttcttagacgtgtagttctgggcctgtggcagtacatcatatcatggcagaaacatatggtgccaaagacttgttcatctcatggtatccaggaagcaaagagtggaaaaataacatcatcatatcccctttttattttttattttatttttttccttgtggttttttttctttttttctttttttattagaaagaaaattattttacatgtcaatcccaggtccctctccctcccccacctccccccccaactaacgccctacctatcccctaccctttctggtccccaggcagggtgaggccttccatagggggccttaaaagtctgtcatattgggagtatccttccatgtgggatgggctcctaaagtccattcctatggtagcgataagtactgatccactacaagaggtcccaaagatttccaaagtctcctcattgacacccacattcaggggggtctggatcagttccatgctggtttcccagctatcagtctggggaccaagagttttcccttgttcaagtcagctgtttctgtgagtttcaccagcttggtatggacccctttgctcttcagtcttccttctctgcatctggatttcagttcagttcaaggtttagctgcaggtgtctgcttctacttccaccagctgctggatgaaggctatatgatggcatatgaattagtcatcaatctcattatcaggagagggcatttaaggtagcctctcttctgttgcttagattgttagttggtgtcatctttgtagctctagagacatttcctgatttctcttttaacttataatgtctccctctattatattatctcttatcttgctctcttctgttcttcccccaactcaacctccctgtcccatcatgtcttcctcacccctcctcctctccccttctcattctcttagttccctccctcctccccccatgctcccaatttgctcaggagatcttgtccctttccccttctccaggggaccatgtatgtctctcttagggtcctccttgtttaccagcctctctggcagcctgggctgcaggctggcaatcctttactctatgtctaaaatccccatatgagtgagtacatacaatgcctgtctttttgtgactgggttacctacctcagaatggtttcttctagttccatccatttgcctgtgaatttcaagattccattgccttttttcccccactgagtagtactccattgtgtaaatgtaccgcattttttctatccattcttcagttgaggggcatctatgttgcttccaggttctggttattacaaataatgctgctatgaacatagttgaacagatgtccttgttgtaggaatgtacttcctgtttgcagatgatatgatagtctacataagtgaaccaaaaaactctaccaaggaactcctacagctgataaacaccttcagcaaagtgacaggatacaagattaacccaaaaaatcagtagccctactatatatggatgataaatgggctgagaaagaaatcagagaaacattaccctttactattgccacaaacaacataaaataccttgggataatgctaaccaaaaaagtgaaagacctgtatcataagaattttgagtctttaaagaaagaattaaagaagataccagaaaatgggaggatctcccatgttcttggataggtaggatcaacatagtaaaaatggcaatcttgccaaaagcaatctacagattcaatgcaatccccatcaaaatcccagcacaattcttcacagaacttgaaaaaaaagttctcaattttttatggaaaaagaaaagacccaggatagccaaaacaaccctgtacaataaaagaacttccggaggcatcaccatccctgatttcaagctctattatagagctatagtcctgtaaacagcttggtattggcacaaaaatagataggtagaccaatggaatcgagttgaaaaccctgatattagcccacacacctacgaacacctgatttttgacaaagaagctaaagatatacaatggaataaagaaagcatcttcaacaaatggtgctggcataactggatgctggcatgtagaagactgcagatagatccatgtctatcgtcatgcacaaaacttaagtccaaatggatcaaagacctcaatgtaaacccagccacactgaacctcttagaagagaaagtaggaaatacctttgaatgaattggtacagtagaccgtttcctgaacataacaccagcagcacagacactgagatccacaattaataaatgggacctcctgaaactgagaagcttctggaaggcaaaggacacagtcaacaagacaaaatgacagcccacggattgggaaaagatattcaccaaccccacatccaacagagggctgatctccaaaatttacaaagaactcaagaagctagtctccaaaacaccaaataatccaattaaaaagtggggtacagaactaaatagacaattctcaatagaggaatctaagatggctgaaagacacataagaaagtgttcaacatccttagccatcagggaaatgcaaatcaaaacaattctgagataccgtcttacacctgtcagaatggctaaaatcaaaaacagaatgacagtttatgctggataggttgtggagaaaggggaacactcctccactgctggtgggagtgccaacttgtacagccactttggaaaactgtatggcaattcctcagaaaaatgggaatcagtctaccacaagatccagcaattccactcttaggcatataccctttttatttttttaggtttttcaagacagtgtttctctgtatggctttggagcttgtcatggctccatagaccaggctggcctcgaactcacagagatccgactgcctctgcctcctgagtgctgagactaaaggcacgcaccatcaatacccaatttaccacatccttttaagagcatgcatcacagtgaactaacctctttccaccaggcctcatttactaaggattctaccacttcctagtagtgccatggggtgacaagtgaggtttgagtgcatagacttttgaaggacagttatgatccaaactgtagtaataggctatgtaacagtgatacaattagccaatttgatttctactctagattcctctagaacaaatgaaatactctcaaacttgtgcttttgatacctcattataatcgtatttctcctctttcaccaagtttatcagctagggtcttgccagaagaatagaaactactctaccatcttcagaattgtggattatgagtcctggaaagaaaacctaataataaaagcaagagggcttgagaagtaaagcgggggtggggcgcaacgacaatgtgaaacccagaggtcagtatctgcatgatgtagtggccagccttggggactaaaagataaaagggaagaagagctgtcattaaaatataggattaggttcctaggccagccaatgttaggaatgctgagcacagtcaccccagccagtgttggcaccagtaaatgacagcagttagagcagaaagctggattgttgaaaggcaatacttgcttccacaaataccagcagacttaaaggagtataaggactaaacaatagctcttccttcttctagcattttgacaaaagcctcatagtataggcatttggggaatgtagttatggatgaccaaccccaacaatacaaaatagaaggtggaactgaggaaaataggtaggtaactggtctgtcaagtaaaagaaatcaagctccttctggaaggcaaataaacgtgccacatttgagactcatgcataatcaccaggaggtattaatgctgcaatattatctagtcctatgacaaccacttattagctcagatatgatgggtagagaatggtggctataagttgtgtgcataccaggtgactacaaaacttcttgcttctctgtctatgttaactccattcacccatccattcatccatccaattcatccaaacacacagcccaatcagtatatcatccattcaatcccattcatctattcattttcattatgtccaatccatcaattcaatctgtacagccaatgcatgtatgcacccatcaacccacccatacattatttcattttccagtctagtctgttcatgactcacagatacatgtatacacacacacacagtccattcaaccatccatccaatccattcatatagctgtcccatccattaattcaacattcatcaatctatccacccatttatccatttagtcagtacctattatatgccaagcattgtgttattttctggaggttcaaagataataccagtctttcttaagtagttttaaagccaaaaggagttgaataactttatagccattgaaaatattgtaagtaacaatcagatgtgttaatcagctttcaccataacaaaagtctgaagcaatcaactaatgaagagaaattttattttggctcacagtcttagaggatgtgacctttggttgggtggccctgctgcttttagggatgtgaaggagctgtagatgtagacaaagtttctgttgcacctggtcctgccacccttcagccctaaataaacacacagagacacattaattagaaacttttggccaatggttcaggcctcttactggctagctctctctcaattattaaccaataactattaatctatgtatttttatgtgtccttatcttaccagagaatgcctagcgtgtcctatcttccctggagctacatggtgtctcctcgtcagctcctctctgcatcctctccccagaatcctcctcctctggtatccctgcctatacttcctacctggctattggccaatcagtgttttattcacaactaataagagaagcatatgtacagaaggacatccccatcagtagatgaccatgggaacaggtgacagagccagactccaaggagtttgtcttgtggctgggaagcaaatgagaaggtgtggaatataccagagctcccagtccccttcatgtgcatcctttctgtggcctgaagatctctcactctacctgacctcttacaagctctatcatctcctagtactactactctggaaaccaagcctttaagacatgggcctttgggtgacattgcagagccaaacaatagtgccaccagattcattctttctttctgcttgtcaaagtactttcccatcccataatacttgtagaatataaaaacattttcacattgaacatatttttacttattttcctctcatcaaactttccatggacaaagtatataatccctacaaaacactcaaacttttgttgttttctcttttgctttgttcatattattttttagtgaacagattccccactttgatcaatgaattcctggttcttccctatttttcacacctttatgatcccacaatctgggagactaattgtcctgtggccatttctctctatccttgggctgtagactagggttttttcaactcttaggtttgtctattttcttgtatcagctttaccaatcttctgattcagactgagagatatttcatgagagtagacattgctggagaaatccttctctactcatctcactgtggaaaagtcctgtccctctttttccagaacctgagagtaagttaaattcttcttctttttcttcaaaagggtttcacttatgtatccctggttgtcttggatctcacactgttgatcagtctggtccagaactcacaagggtctgactgtcactgcatcccgagtgctaggattaaaggcatgtaccaccaccacctgttcatattcttttcagaatgtatttaaaaacttggctataagctcatatgtgattgataatgactaatattcttccaagtgtcttcattagaccatctgaatctcagtttttaagtgggaagattttttctcccaatttcattcattctactgattcagactctcgtataaggggcccagaaaaatcccacgtttaacaagcacaccaggtggctctgatggtacaaaaatgtgagactactgacaactactgcctttgttttcagctctgacactattattctttcttccttgcgtggttttgaaaatatttttatcttttacagcagactctcttgtcatcagacatcttagatgggcagtaatgatgtgaagtttgccccctggtttctgaaatcattttctttgaatcaattatctttcttgtatgtgacagaggtttttattatatataatagagagtagaaagccattttaaaaagacacagcactaaataattgtctaattagcatgtatcaaagaagacaagaaatatcccattagaaattcttagggcgggctcataataaaccagttgtataagctttcttctcctggtagcatatagcaaatcgccttcctgacttgatgctccatctccacataggcccagggaggagagcagatattgatgttctttagatggtaaaactaaggcttgggaagaatagaggtgctcgtgggaggtcacaccaggagttaattgaggaactgacaatggaatccaggtttcctggctccacctccaatgcagagtttttatctttgctaacacatatgcaggtgcacacacatacatagatacacacacacacacacacacacacacacacacacacacacacacactgttactactctttgcaatgtattatagcatgacataattgaattaggctcctcctttgcacccactgtttgcaaaaggaacgtggcatcctttatccaggagtgaaaagctttttggaactagtccagcattgccagtgaatgattgcatcttactcacccagcgatgctgatgacaaattgggaggcaggaacagacagccatgatcatttcaaggtccaccgacacagcaaaaagcaagtcagttaccaccaaccaatgaaaagggactactctgggttaacttccagaccctgaaatcttagctcagaatagccagtaagcatttacaggcatatgctcccatcaatagtctacaacgaaagaagagacggatatagtaagttctccaaaatgactaaaatccaaaatcatttagatttggcttggaaacacattttcttttaaaatccttatattatattgtatttatttattttatgtgtggagctgtggggtgtgtgtagaggtcagaggacaatttggaggacaaagtactttcttccaccaggtagattcttgggatggaacacaagtcatcagccttggcgacaggtccattacccgccaagctgtcttaacaaccacataacacatttttgcattttgtatttggattttggattaacttattttgagaaaatggaatattttaatattctaacaatgagaaacatggaataatagcctggtttttttcattctgtctctttatttaacactacttctccatgcaaggagtaattggtgatttctgatggacagtcaaactggacattatttgccacattacattatatagttattgtatctactgatatatggctgctggtgaaacacactcagggaaattttaacattaaacattaaatttagctttagcattaaatacatagccttaaacatatcagataaaccctgatcgttgcacactggtctcaaactcacagaaatcctcctgcctctgcttcctgagtgctgggattaaaggtgtgcaccatcctgcctggctaaattattcattctttaattgaaataaaatttaactgactaaatgtaattttttctaaacctggtaccccagagtgaagattaaataagataatacatgcacagtttctgaaggcagtaaatattcactaaaattgtctttgtaattgcatttctatagaccctagcaattagtaataaacattttttgtgtatgatttgactgtttccaaagccttcctgtattcataactgtgctcagcctcttaatgactgagttgtatccccttagcagatgagaaattaagccttgtagctgtgtttcactgagtgaacatgctttatggtactttgtgggcatccatttcatgagacagatgcactgtgtactagccacgagggattatggacacacagttttaaatactgacaaccactacaaatattactaaatggacatcagtttttgtggatttgttgtttgtttattttgagataccttgctctgtggcactggttggttggtctaatactcattatgtaggccagataggtctataatttgcaatattcctcctgcctcagcctctcatgtactgagattacaagtttgcaccccatgcctgcctgagcatatttttgttttgtttttgtttttgtttttcgagatagggtttctctgtattgctttgagactgtcctagaattcgctctgtagaccaggctggccttgaactcacagagatccacctgcctctgcctcctgagtgctgggattaaaagtgtgcaccaccaacatcccacgagcatatttgttttacaattgcattatgagctcctctcaccagagaccttggctgttctctcttgttcaaccaaaggactgctcaataaatattttatgagaaaattaaactttcagaaaattgctatatttttcaaataataaaggtactagcaatgttgatagcatctatggtgaactgggcttattctagattcatatttactaatgtatactattttgtgaaatggatagtgttgtctattttatagatgaagaaactgatgtgtggggatcagtcactttcctgttactatgtagtgagctgggaggcttatttccaggacctggatcagtgtctgcattcttaattgttgtcctctttagcctccagcagtgaaacaccagctttaagaacatgggcaccagaagtgtcttgatgcatatggtcagtatggtggccatatgactaggaacaacccagcagccactctggcatgagagcctcactggaacttttttgcccctcttacctgacagtaaaaagtatccaatagttctttcaaagtttcattatttggctattataactttgcttttttataaggttaaaaataatatttcttctttgatatggcaaatatttacacatgttttttttttgccatatgaataactacatttttattttcttttgtggaaaaaagacttcaaaagttgtttccttgctctttggtattgtgtttgaccctctagcacagtggttctcaaccttcctaatgctgcaaccttttaataccgttcctcatgttgtgctcacccccagctataaaattatttttgttgctacttaataattgtaattttgctactgttatgaactgcagtgtaaatatctgcttagcaggatatctgatcaagggtgaaagggtcagtttgatccctcatggttgagagcctctgctctagcatatgctgcttagatacaaatacagagaaacatatctgaatgttcctccggggcttccgccattgcccttgtatttagaactagaaacacagatcctggtctaaactcagtactgtctgctatggcttctgaagattctacccctagaagaaagccttcagatggctctccttcattccttcaggtttgaaatgtttgacacctgaagagataggttaattatttctttttgagccattccacttttcctccatcaacccaatccttccgtgcttgcctctctggtgctggggatggaatccagggctttgaacacatggtactactgttctacttctgatctacgtgccctgcctaaccagtttccttcctaacaccattcccctgtgttaatatatttttgtgatttattaaagtgtgcctgaggattcagaaagcaaagtcagtctcaagctatagatgaggcagtggtggcacacacctttaatcctaggcctcaggagacaaaggcagatgaatctctccaagttcaaggccacccagggctacacgagattgaatcagtctaaaagtgtaacagagctcatgcctttaatcccagcactagagatataaaagataggagcagggtcttcaggagtcagtctcaggattctccagccatgttgaagagatcatagcagtttgggattgcagtctgaagtttggtggagccaggatcacctttcagtctaaggtaggggtaagagctagtggcggactgctttgctttctgaatcttcaggcaagcctttataaaccataatgtatcaccacattcccctgccgggacaatctcagcttcactatctgagaatactaaagaagtcccacaccacttgggctctctctctctctctctctctctctctctctctctctctctctctctgtgtgtgtgtgtgtgtgtgtgtgtgtgtgtgtgtgtgtgttgtgtgtgtgtgtgtgtgtgtgtgtgtgtgcacacgcactcgtgcatgcacacatacggaggatgcatgcatgtgcccatgtgctcacacaatgactaaagagaacataagagtatcctatatgtcactctcctactgagacagagtctgtcactgaacgtggaggcaggctgacagccagcaagcctcagtgttcctttcgtcactgtccttcacaggatgggttacaggtgcatgtgtggccacaaccagcttattctgtgggttccagggctttgaactcaggccctggaactcagagcaggtgttctctcccaatgagttatctttccagccccgcacaccacttgtttttgaaagccagttgttaatccaaactttcagaacaacaacaacaagggcttatgtttggtccctgctttagcaaatttcatcccatttctcacagacaaccctgacctcacagcacagacactctctcccctgtatacttcaaactgagatgctgatattacagttactgaaactttagccaacattcgaacttttttttttttctaaaagtagttcctgtggtgttttttcaacttctccaaaatttcttgtgaatgaaatagtatccaacaggggagctaaataccttccgattgcctgtcaaacattagtgttctagaagattctggagctttctcacacctgcctgtctgttactgtttgaggtcaggaaatgcttacaacattcactctctctgggcacagtttgaaaaggtgaaaaagccacacatgcacattgtgttactgttgaaggatagaaaagatagaaaactggatgtcgtctggttatcttttgtgtcagccacaagatggtaccattgcacagtctagagagagcatcagtcagcagagaccctctagtggacacatcgcctgttaaatgtcccatagagaaaacttgtctttataatctacagtacaaatgtatctctcattccccatcaaaagcataatagaaatgtacacatcttgcaacttgaccgattttgtttctctcattctgttttgcttactggagctttaggatcgccttcacttctactgaaggagaaacttgtcatttgaatgctggagtcagggaggcttgactgaaatcccctcaacctttaagcgtgtgagaagccctttccttttagggggcacaggaatcagccctccaaaaaggatatgaagtttatttttgtaacatgaagaatgactaagcagtatgttttgtcataagacagaatttggacttaggatctagcagaaagagtggagcattatccaatagtggcaagctggaaacactaacacacgatggcaggggataggttgaaatggccacaccagaggcatgctgctgtagactccaactaacagaataggaaagaagctttgtcatgtgggagaatacacaaggcctattgttaaatggaaaaaaaataacaaagccatgtattcaatttcatgcatgtgtgtcaatgggagggctacaaaatcagtgaattacagcagctccatcgaagtgtggctaatttgtatttttggagtgacatctacactttgctttgggaatgcaatcttttatacaggagatgagatgactctgcagccaacttggctctcactcctcaactcacaggggaagaagtgatgccttgattgataatttcctcagagtgatgagttgggggggggacatgtcccatggaaagtatgtgagagacacagctgccacatgtgagctttacacagatagaattcactgccttcagggcctcaagtgggtctatgtgggattatgtaagatgctcttttaagaactggccaaaaattggttaaaagtgtattttctatatctgtatttctctcatacatccatatatatatatatatatatatatatatatatatatatatatacacccatatatatatatatacatccatatatatatatatatatatgtacatatacgtaatatatatccatgtaaatatagatacagatatagatagtgtgggttacatatatatgtatgttccatatatatatccataaatatatatacagatacagatatagtgtatattacatatatatgtatgttacatatatatccagatagatagatagatagatagatagatagatagatagataaagatatagtgtgtgtgtgtgtatgtgtgtgttgtgaccggagtattggctcttttaaaatgtactacaaagtagaaggtcaggacagccaggaacacaaagcatgaagctaatcgccagcccttccaacaattttgtttcagaaggataagtagagtagggactggggcacagagaggtttgttctccacagtgatcacttcagacaaagggaattgttctaactccttttgtagtttccctcatagcagaactgcctagcagcgatggcatcctgtgacaaagtttcagtcatcaggacctcctctgcatttcagcagcaggatcaaacagtggacatgcttgtagacagagactacttctatatggaagcgtcagcatcactgtgacttgttccatttgtttgattacctgggaagtgtctgtaaaagggcacatgtgacaatgtgagctgttcagtcatgacagtctgaagtactaagaattctttagcccccagttatttagctttgtgttgcctgaggcaatcaattttggttcacagttccaatggtttcagcccagggtcagttgccctgttgatttggatttgtagccaggcagacctgcatatgctcactgtgtagccaggaagcaaatgagagaatggggatgccagggtcccacactctcttacaagaccacatcccaaatgatgtaagtggctgcctgctaaaggtctcgccatcttccccgttccctgacagtgaggcctccacatcactgataggcagtatctgagaacaatgtttagcatccccaggctccttagtgatgccatgaaagtccatcttcacataagtaagcattgctgaaagctgcataaatcccagaaccccctgttttcacatgcttggaactcaggaaacacatagacaccttcctggggggtgatacaatgttctgagatatggtaatggataataatcagactgtgtttatcctttttagtttttgtttgtttttgttgttgttgttgttttgagacagggcttctctgtgtaacagctctggctgtcctggaactcattctggagaccaagttggcctcaaagtcacagagttccaactgcctctgcctcacaagtgctggggttaaagttgtgcaccaccactgcctgtctagactatgtttatctttctggcacacttttgtggcttctgtaaacattggtgggagacctactagtacctggtcactgcacaagacacctaggtgggtatcccagaggcttcactgtctgttagaggctcggaagggcagtggcattgctgccactatgatgggagttgggaagaacgtgaatggaatggataatagccacagattctgtctaggctagatgaacccttggaattacatctcacttcccaactatttttagaggtatctaggaaagtagtctacttcagcagattggaatccttcagaaatactgctggcagcaagactttccccttttggtcaccagacagccccccaaattagtcgaatctagaaagttctaaatttgagacaaagtttttaatgcatagtagttcgaatttaagtgcaaacacggtgtgatttctatgctggctttttatatgcaagggtggctcatcgttcttggctcctctccattaactagggggcagctgtcttaacagcatgtgtctgctcatccctccagggcaccgtccacttgctaaagtctctggtagacttgccatctcttttctaactgaatcccatccctaattgtgccaaccaagacacccctcatccaggcacttaacaaaactcccacaatactttccttggtaagtgcacttggggggcttagtcataaccagggtgacaagattctctctgccctctcctccagttggttacatgatttttagatagaatgggaagtagaaataccggtccttccttcaaaaggcagggagaaaaaatagcatcattaaagatacttaaataaaaaaaataagtgttttctttcttctacagtcttccccccctccaacttgctatagggtttttaaattgctacacaatgctagcctgggtgatgaaaatttaaatttttagcctgaattttagcatccatctttatattgtcaaagccaatttcattcttttgggtttaaaattaaaatattttgacgtaacgctgtgcagtttattatataaagctgacgctttgaagtgcatatgcattgtgtagatgggctaaatctagccgattaataaatgcattatctcacatagttaacattcttgtggcgagagcaacatagcatccttctctctccatttctcaagaacataattaactgaggtcagtcgggaggcaggaggaatgagagagaacacgagggccagagccttggctagggttttcatgagaaggaaggggggaacagtcccctgtgagtatctggtggtaagaattctgtcggactttgagctacaggagtggtgcccagttgtcctgaggtcatgggtacagaggaatgttgcctctcactaaaagccagcctggggggtgctttggagtattactctagactagctagtctgcaaagcaaagtcatgcttagagataccttgcttatgaattctttgaattagctaaccatagcatgggcagtccctgcctggtccacaatgtccccaagatgtaaaagcatcgttaaatatagaaaattaaaacacatgattaatacaacctatataacagaagttcaaacggaaactatttaatacatcaagatggcggcaagagtgtgatactctgtacttctgagcaccggccccgtgcctctgaagccggcagtgtcttttccttggcaaatttcatttgctttcttttgttgttgagatagggtttcactatgtagctcaggctagcctcaaactcactaaatagctcaaggtagctttggactcggacttccctgccttagtcttcctaaggctgggatcacaggtgtgtgccaaggagaattctttccagattaattactccaggctcagtcacacaaagagcaaaaacagggttggttaataagtgttagaaggttgcctcttaggaacagtggagagaagacagggaccaggagactcaaaaagacccaggtggagatttggccagtagaggtcggcagacaggcaaggctgaggcttcatgggtggggcagtaggaggcaatggtataggttagcaagcgtgtatcccactctgtacagtgctgagatgcagcctataccttgaagcaaaggactgggtctccagctgtacttgaggataacaattaaaattcaccttgtagaatatgaggaacttttaaagggcaacacagagttatttctgttttataatgatgactttagccaaagtgtcacagtgaacagtgggagagacaggacaaaagacagaggcaacttgagagatcagcaaaatgagtctagcctgtggatggagaggagtccccactggcaggtctggcagggaaaagcctccgaactattcacattgagccaggtttgtgggcagaacaccaacccctagataggcagtgcacagacaacatcggagctggagagtattagcacatatgagaagaggctgggccttaataataaggtgctatccagtgaaagaaatgggcttggtctggggacaggagggactcgccagtgcctcctccagacagtgctctacagccgcttgaaggcctctgccctatccagccaggctttgtcccaagtggacactgaacatgcaggtggaaggatagtgttcatcttagacaagcctgggaaccagccagacttaaggcctggaccaaaacattttatacaaaggcttttagaagataaaataatcaagctacatttttcttattataaaaatctgaatcataaataagtaaaatggaaaaatctaagtaagtacaattttgagtcactgttaatgtttagaggctaaatatctttagtattttatctttggttttttttctctccccccttttttccctctattttttatttaaataagaaacaagattgttttacatgtcaatcccagttccctctccctcccctcctcccctgcccccactaacaccctacctattccataccatttctgctccccagcaagagtgaagtcttccattcggggtcttcagagtctgtcatatcttttgggatagggcctagtccctcccctgtgagtctaggctcagggagtatccctctatgtgaaatgggctcacaaattccattcctatcctagggataagtactgatctactacaagaggtcccatagatttctgaggcctcttactgacacccacattcatgggatctggatcagttccatgctggtttcccagtgatcagtctgggggccaagagctcccacttgttcaggtcagctgttcctgttgtttcaccagcctggtcttgtccactttgctcatcactcctccttctctgcaactggattccagttcagttcagtgtttagctattggtatctgcttctatttccatcagctgctggatgaaggctatatgatggcatataagttagtcatcaattttattatcaggagagggcatttaaggtagcctctccactattgcttaaatggttagttggtgtcatccttgtagatctctgaacatttccctagtgcctgaattctctttaaacctatactggctccctctctgatggcatttcttattttgctctcctctgatctttcccctacacaaccttcctgcgcctttatgtcctcttcacctttctcttctccccttctcattctcctacctccccctcccctctccccatgctcccaattttctcagaagatcttgtccctttgcccttctccaggggaccatgcatgtctctcttagagtcctccttgttgcctaacttctctagtggtgtggattgtagactggtaatcttttactctatgtgtaaaatccacatatgagtgagtttataccatgtctgtcttttttgtgactgggttaccttgctcagaatggtttcttttagttccatccatttgcctgtgaatttcaagattccattgttttatctttgtattctcccttaatttgcaaaaatgagagtcttttttgttattttggaggaaccatctgttttactttgggggctttcaacagattaatgctccttacatgctgtgtgcttaccttgagcctccctggaagcagaaccaaaatgctgctccctttgcagtctctagtaccttagaagtcactcttgaagtcttcatcaagggccaagcattggtgagcagaagatgggtatctggatacttcaaaaagtgcaaaaaaaaaagtgcacatagataggagctggacagtgggcatgtctttaatcccagtattctggaggcagaggcagcagatctctgagttcgagggtagccttgtctacaatgtgagttccaggacagccagggatacaaagagaaaccctgtctcaaaaaataaaaaacaaacaaacaaacaaacaaaaaaacagtgcacatggaagatgatccaagtatttgataataattcaatttatataattaaatgaaaacaatattctgtatttattataagaaacaaacaaatatacatattcaaaacacatacagattaagtatagtgattttctatttcaaacacctgaccatatccagctcctgtcttttctgtcgttccacaccagtgcatgtttgagattcatcggcttctcagggaacagagacagtgaccaaactcaaattcctgaaaatcttggcaatttggaacagtgcttcaaatgaactgagtctagagagttaactgagagataaggttctttccggtgactgaaaatttaacaagaaccttgaagaagtgcacaacactggggcagggatgaggccagtggggcagtggtgaggacatttgggcggtgatgaggttgacggggtggtgatgagtacactggggcagggatgaggcaggtggagaagatgcggaagagcgtgaggccgtggaggtctatgggaacgatgctctccactcagtgaagacggcctgtgaataaagcaactccttgctgatacagagcccacagaagtatgagctttgggagaatcataaggcgttactgatttgtatttggcttcatgtctctgattcttttcactgtctctccactcatgcattgctttttaattatttgttttcttgtcatgagcatggggctttgtgttagttagatgaacctcattcagatgtaggtcatggttgtagctcatcaaggtcctttggcatcctgatttggtcactgagactctaagccaactctgccagccatgtgtgcatttcctcagcatgttgttatactacaaacctccattataggtgagaaacagaggattaagggccaaggcactccagccagtcttttgaccttcaggcagatgttccttctctcactgaggacaactttgaactgaagagtgaagagtggatgtattagaatgcacataccaaagatccccccccctctctttgggttttttgagacagggtttctctgtgtagctttggagcctactctggcacttgccctggagaccaggctggccttgaactcacagagatcctcctgcctctgcctcccgagagctggaattaaaggcgtgcgccaccaacgcctggcaaaaggcctgtctcttaagttgatattattgctttcatttctcagaggagactctcaggaaaggtaaggatttttgttccaagtgaaaggacaaagtaagtgctacacaagagttcttgcagagaataattatgcgagaaagatatctcccccttttgagattcttcaaatgtcttggaggctacgtttttggacaacctaggagtgtgggtaaacaaggataattcaacgagaaggactctaagttctaatgggtgatgattgcagatagaagctgcttagccatgtatgagaattccacgatgaagctgatgttcagaaagggtgtgctatgggaaagcatgtgaacctcgcttgggatcctgatatgggatctctgtatttcaacttagacaggctgaaggattttcacttcatcctttggagcatgatttgttctgtttaattaaacttcagcctacatcaacaagatgctgattactctaactgaaaagtgtttgaagaagtctattagctagaaacaaaattactgccttgccagcgagttttagggtagccagctccacctcaaatagaacaatggaagttgagacttgggatgggggtggaaggagcccttaaaaatctattctagcctagacttccttccttccaatgtttggcatagagtctggccacaaagactaggcaggccttgaacttaaagtcctcctgtttcagcctccctagctactgggattgcaggggtactccatcatgccagcttctatttccttcttttggaagatgaagaactaaggtcccgagaccaaagcagttttatgaaagtcattatgtggcttggcttaagaaacaggattgtggggctctttctagtctccaccttgagatgtcccgttgccatgtggctcagaaaatgcactaataaggacttctcagactgatttaatttatttgaagacattaagaacatttataaaacccccctttagaatataaaaagaaacccaccagtgaaaacctgataggaatgagttttagatgcctctctctgagagtagccatgccgtgtgatgcctctgatgacacagataagcaagaacagacggtggttaagttgggctaagagaaagagccatgcagtaaaagctggcaggcttttaaaattgtacttggttgtaatttctaaatttctgtggactttgcttttctgactataaattgaagatggcattttcctttattgttttgaatgaaggggaaatgtaataatagtgcccagcctatatttacataaaataaaggtcacttttttctttctagacttttcctctttaaaaaaacaacaacaaacaaacaagatttctctgcgtaacagccctgactgtcctggaactcactctgtagaccaggctggccttgagctcacagagtgctgggattaaagatgtatgccaccccagtctggtgacttttcttctttttatgtatgctagttttggagatcaaggaaggcattgatgtttaagttaattcttaaaggatgtgtaagacttagccaaatgtgaaggtggcagtgaagaaatcaccattatttcaaagtgaggcagcaaacagtcatgcaaacaccaaagagagaacgtgcaggaattgtgagttgagagtgatagtggctggccatccttggagctcagaggtagacaggggatagggcctcagaagccttgggggtgatttgggtcgttaattttaagggcaataaaaaacatcactagagaactttctgaatctgagtgttgctgttttgtcactgcaattcagaggccgcgaatattacctcacagagaaatgaatagagataactatcaaaaaggcagttttaggagtgagtgtcttgttcttgggcccagggccttagccattgtgttccaccactagagggcgccagtggccttccatggctgtgtggctaaaggttacttggttgttaagtgacaacatggtggcattggcacttgactcaacagtttggctgttttccagggacagggccgttatggcagttggtggttggtaacttcagccctgtgctctctacccgaccatatgtccagacactactgaaagtcctgggcccagagcctctggccagctgaaaataaaggcagcctgacaaggcttcttgctgttggcatggagatgacttgagcattcaccctccgaacagctcccgtacaggagaacgtctgtgtgcttccagaatgggaggcaaggttcatggtttttaaaattcatgaattgcttggaatggaacgttcttgctccaagcacaaggaagaaacagagacgctgtgtctgcatgacacccaagctttgggtcatctctggaaaaaatgcagtcaaaccatttattggaaatggtgtagctgcatccccttcctgcatcctctcaaaaaaaaatagttgtgttttaaaaaatcaattaattatttacttttagcttttaaactcaatattttggattaattcagcctcaggcaactaactcaagaaatttagtgtttctcttttctcttttaaattactctaaaacagttatttgggctgatctattattgagccatggtgatatcaaaatacagaaatgagaatatgatcaacaactagaaaaatgtggatttggtcaggctccttgccccatttatctctctcgcctctttggtcccctttcttcctgtctcctgagcacccaatatccttatgatgatattagacctatcagcatattccatcagcctctctttcccaacacactcaaaagaaaccttagaattggagtcagaaataaagaaatttaattaaattggttttatggattctaacatgtaagtgtaggggcaactgctgcacactctaactctttaactcttctggatagaaacaaagggatattttattttagatgattgatttagatgatttattttagagtcattttattttttaaaaagaagtagaaagtgatttctcccccctcaggtggtgggggacacttagtagtcagtggactggagttagctggagaaggtctggtgctgtttttggagtttcaaattttatctatgtgaataagtcagggttgtaagatcagggttttggatgtgtttgatgtgatctttctcatttgcttgggttctttctcctatttaaaccacctgtacatcagggggtttcatctttcatcctcatcctcaagctagtagcatgtctgtggagaccataactgccaagagaagtggctgggtaaactcacacaagataccagatcctctaatagagacgtcatcttcaaaaggtatggaatatgattggaagttaaaagtatcccatttcttttcactccaaaatagaataattttatatattttcttattttaaaagcaataggtgatgatagcatgaagacataaaatataaattaagtgtaatagggaagtagagacaaagatgaaatgacaagcatggccccatatttaaaaaataactaccattaaaatattaaattgtgctgggcgttggtggcgcacgcctttcatcccagtactcgggaggcagatgcaggcagatctctgtgagttcgaagccagcctggtctacaagagctagttacaggacaggctccaaagctacacagagaaaccctgtctcaaaaaaccaaaaaaaaaaaaattaaattgtttgggatataatatttgagatagtttttccttgtactcatatacaggtttcacaaagaaattattgatagattgtattactattttgtaatctgattttattcacttatttatatatcacaaatttcaaatacaccattatttttattggtggcattggtttttttgtttgtttgttttgttttttgtgttttttgttttggtttggttttgtttttttgagacagggtttttctgtggctttggaggctgtcctagaactagctcttgtagaccaggctggtctcaaactcacagaaatctgcctgtctctgcctcctgagtgctgggactaaaggcatgcaccaccactgcccagctggtggcattgtttttaatgaccaaaaataccataatttatttaagaaatttaatcagtataatggaaatattcagccttgaaaatggccaatgaatattagacttggatatttaaaccttatctttgcccaagatatacaatatagcttgaagaagaatttgactagtgtgaactgaaagtagtgttgttctggccactttttcagaattcacttcagagacaggaccaaagaattgcagagtgatttgctctcctattgagtagaagttcttctgtagactcagtggtatcattaagatcaaacaaaatgatcaagtgtttctgcttttaagtgagagccttaaacaatccatttggcttttacccaagtttagcctggccaggcagggttttataacatggccactcattcactatcagtgctatgtgcttttaatttttaatagatcattcttggtaagaattatatgcagcctgccaacagaggaaggcttccaaagaggagcttaagatgaggcttgaagattccagaaggctcttctgagcattggactaggagtcctgccacactgctccataactaggaacattgtaagatcctaacaagaataattgcaagtctttgtaactcaaactttattaaccttgatggccacttattacaaatagtgctatgtgcacacatatgttttcagagcaaaagaattccatggaaattttatagatggacttcacagatatgaatggaaaaacagggctctgatgaaggttactcagggtctgtttgttgaggttgttacagaggggactccagttctgggatacccagggaatagactacgttctctttaatgctaaccagttccaccatcgtactcttaacttctgcaatggacagaattctgctccaaagcttgaatgtggtttataaacatcttaaatgtgtttgaggaacactaagattcattcttaaagtaaattaatttgactgtttatgatattaaagctatcaaatcacttaaaactatctttgaatgttaagaattattgattattgatcactattttcttcctcctcctctcctcttcttctttccttctctcccttctttttctccttctccttcttcttcatggttttcttggtagtctgtctcttggaattaattgtttttatgaccaaaaatatcatagtttatatgaaactgacttctgatttaccaaataaatgatggactagtttccagttctcatattctctctttcttttgcctttgtttctctttgaattacagatacagtctcatttctgcagccaggggctccacaaccatggattcaactggacagagtttaaaatatttgagtggaaaattgtgtttgcacagaacatttacaggcaattgtttttaccatttctatttgtacagtactcaccttatattaggcatcttgaacaatctagagatgcctctaaagtatatagaaatgtgtgggtatgttatatacagatattaaccattttctttagggaacttgggcatacgtggattggggttatccctagaggagtcttgaatggaccccacacagacatcaacatgactatatttcttcttggccattttagcctctcttctttcttcctccaaacttttctaattctatttctttctcctccaaattaaatgtattttatgctttcccatactctccaggtagacttaccaggtcgctctctaggcctgcagagtttgttttttcccactcacatgataaaaagctggattcccaatctctcgtgtccattttttgcccaccctcatctttgagtgagtgttaactaaagggcaaccaaacgattgtgtgggggtgggtgggtgtatgtccacattcatgagtgtgtatgcctgtatatgtgtaggtgcttttgtatgtagtagaggcctgacgtcaacatttgttgccctcctctaccatattttccttattgtttgaaacaaggtctctcatggaacttggaggtcattaagtgagccaggctggttgcccagtgagctccacctgtctttccctctctccccatagccttatcactggagtttcatcactatgccaagcttttatgtgtctgaggtttcaaactcaggtcctcatgcttgcagtacaggcattttaccaactgagtcatctccttccacagccctccaaatgcttttgatcacaagaatctcatccaggccttgcccatagaaggtaaggccctagtcctgtgggactctgctggcagcaaacacatgaccgtgcacatgactcggagagaaagccgtcggaaaagctctgtttgggaatatttgaaaaaataagctggtgctgtaggagtttaataaaaactggccttgtgccaagatggaaagagtgtggtcatcaaccccaaagagaacttcagctgagagggtttgttttcagatgaaaaccgtcttcctgttttctgactacatcaatgatacagcgatttctttgataattgccagttgtgcacaagccagtcagcagaaaaatgagagtttcctttctgacctagctgagagaatgttttgcaaaagaaagaaaaagcaaaaaggagaaagaaaagaagggtggcaaaaaaatccatagcaaatccatgttgtgaaaaatctgccccacccactggctttggaaaatcgagactagtttgatgtccagaggcttgcctgtgtcctaatcattgcctctcccagcaagtatggctgcaagagggcctgatggacccctttagtgatttatttcatataagcaaatgtagagcccatcaccggccatttatcaccagcctgcttctgctttgtaagcttgaaagagcatatccgttgatcattggaattccacttagatttttctcattaaactgctagcacattttatttcctttggacagggagagaggagataacattccaaactttcaaaaacaaagcaaaacaaaaaaaaattcttcaaacattgtaagatccttcccttcaccattgtggaaggaacttcaaattaagcttcagattttctactgatgttcaaccaaattgaaagttttaagatgtaataaaattgtcatgttacgccaaggaaacagggttactcatcttggatgacttctggtgccaactcttcctattctgtctgcaaggtcagagcaaggtcaagcctggactgcttacagagtgggtagggaaggaatgtagggagctggaagcttgggcttctactctggttctctcccaggacagagcttaacttcagccttgtaaacctgaatctttttgttgacaaaattcatttataagaactgttgttttgggttcctgagagaacagcaatgtgtgtgtggtggtggtggtggtggaagggggatgcagcgagcgaaggagcagctttggtcaggagaagcccagctatgaaacagttgtaaaagaggtttcaagggtcccctggggaactcaacaagtggatcatctgccagaggagtccattttcatagttaactgctgagtcaagttttgtttgttttgtttgttttttggttttgttttttgttttgcgagacagggtttccctgtggctgtggaggctgtcctggaactagctcttgtagaccatgctggtcccgaactcacagatatccacttgcctctgcctctggagtgctgggattaaaggcgtgcgccaccaccgcccggctcaggtcttgctttttgccaaatctaccagccatccttagaaagctgcccacagtgagacaagacttgcactcttgggattggtggcaaacgcctttaatcccagcactcgggaggcagaggcaggcagatctctgtgagttggaggccagcctggtttccagagtgagttccaggataggctccaaagctacagagagaaatcctgtctcgaaaaaacaaaacaaacaaacaaaaaacccaaaagacttgcactctccttgtgtctgctattccctagacaggctagccaagagcagtcgggactagcagcatacctcctcatgtcaactcatggaccctcagacagggacagatggtattgcaaatacctagtaactattatattgaatgttatgtgcattcgtgattgatgacaaaaaatatgaggccctcagaaagaaaacatgaagactaagaaacaggcatctggacaatataaggtcaaagcaattagtgactgactgcaggatgctcctttatccccttgccttgtgcctccccaagccaggtcctctgtctcaggagcattcttccccaacgtcacctaccatggatcaactgcttttgcaggacctttaaaacatgtgcacttgaacagccctgtcaatcagcaaaaggcaatataattcaattttaagaatatagtctttgaaaccaaatagacatttattcaaaccccaacccttaatatctgtggggcagtgtgcaaaggatttagcatttattagcttcaaatgtttcatttataaaatgtggctgacagcattgacctcatgggggtgagtcaaggaataacctagaatggtaaatgaaaagggctcaatgcattctagagttaactatgaaaatgatatcaatttaatattaatgtgattgtattaggcatccagccacgtcttcctaacctggtacatttgcattacttgcctgtgggatggaggtgggtgttggctgagatgggtcaaattttctgcacaatggtcagattagtcaatgtcacagcatctttttatacatagaggacatgcaaagatagagttgtctgatgttaagtaatctaaaaacggagatgggactgatgagttggtcactcggatattttactttctccactgacttctgtctgcacagagcaagggccctgcaggagtacagacaacagagggcagtgatgacatcatcaggaaatgtgaagaccataggtgggctgccatttttataacttgcttcttttacaaattcttatattctgcttagaatatgtactctgtaactattgtataactataagaataacaatatatgtaaattagcacataaatttgcataagtatgtatagtcaacatccaccagggacatatatatatatatatatatatatatatatatatatatatatatttttgacttactatcaataataattacttttccaaggtaaatatttgctaaggtggagactagggtagtatgattcctgatattaacttcagcagaaatcagtatccacttatactcccaagatccaaagcaggcattctaccattttaaaatacattttagttctaaaattaaacgaaaatccaagtgttagatttcctgggtgctatttactcccaagttctttcaacaaaatgttcaataaagtaaaacatttcttgtgtcttttacccctgtcaccagtcagaagctacctctccacggagattagaaggaggataaaggtaagtggtagctgctaaaggagttatctggaaagattttaacctgctgtcatgaatagaagttggcagactccctcccatgaaagagtgtgagccactatttccaacagcctttagccaataggtccggaagaattttgggtgaatccacaggtcagagcagggagggaaacagtgaagagaaagtgagctatgccagtctagctacagggattgggttgggaggctggaagtgtgtgggcactgcccatatgtgcatcgctgtgtgtgcatcaccatgcgtgcccagctgtggctccttgtgaagacctggagttagttcatccaggttacaagtacttgtaactactgaaggaatggatgaaccttacatcagcctagttttaattcttaaatgcttgaagtaatacttggccataaaaaagaaaaatgttgccaggcggtggtagcacactgggaaggcagaggcaggcagatctatgtgagttcgagaccagcctggtctacaagtgctagttccaggacagcttccaaagccacagagaaaccatgtcttgaaaaatcaaaaaaaaaaaaaagtacaaacgaatttaaaacaaaaaatagagtttcttgttgctctgacaaccatgctcactttctagcaacaactagtatctgcattttatgcaccttccaggagcattctctgtgtgtgcacatatataatattaaaatgtatatccacatctgtacatgtacacacacatccacccaaattcaagcatactgttcaccctgttctgttccacccttgttttcctcatcttgtacatatttccttatcccaatacacaaatttatctcatttttttcaagcaaaggcacgataaatacccttagtatctcatcatataaacggaacacgtctttcattttcttccaatggtgaccatttgaaatgcttgccatttccaaagatttaatggtaaacacctttgctgtgcttcagaggtatgctggacaggctcagtgggaatggtgtctcccaacaatgcacaccacagtggccttggttcctagtactctgcaccatgcccgagtgtttctgcgctataaaacaccggaagaccaatcactggagcaaaggctatgctcggtgcacattctcatattgaatgtctccaatggtgaacgtgttaatgtgctttgattactgaattatctgagaggttatctagagaaacagaaccaataagagaaacacgcacacagacacacacacacagagagagagagacagagacagagacagacagacagacagacagacagacagacagacagattcagacagacacagacacagagaactcccaccattatcagtgagcaagctgaaaccccaggaaaacctacgctctagatcttgtctgagaaccagagtagttggttgcaaaaagcctagtctgagttcaaagctaagttcaaaaacaagagaagatcagcatcccagactgaagttagccaggaagagaccaggacttctccttactcggaatattgtttcatgaaggttcctgtggcctgaacagggcccactcacactgaggaaagcacactgctttagtctccggattccagtgttcattttattcagaaaaacaccctaccagacacacccagaataacacttagccaaggcaacttgtcaagttgatataaaaccattgcagggtttttcttccaagccttcaaaggagaacaggttctgcccctttgctagatccagttagggctggaagagaacctgctgcataaatgagggctctgcttcccagagacctgagcacactgggtttcagttttaggttcttggtctttagaaactatgagactttttatcctactctttgaaacactcattaatgttttacaacagtgtcatcccctgctgttggcacactgttgcctttgaaagtcagattcaaccttcctttgacatgtgtaatcctgcaaacattgatggtcatttttgtatccaaaggctttgggatcaaacctttagggacattcttactcgtgtctctcagctttcagttcatcagcagattccaaaggcatccttgatgagttttagtcctctaatgttcatccaatttcatttacaaatgaaacaagtggcctttgatcacaaactctttgcaaaactctaacacactctgtccaatctgctgcttcctttgtactttgaaagtagtagctgcactagagacagcttgaccttaccgtgagaaatagcattttatcacgaaacttggcaaggccttcaatttcctcccatctcatatctgtcagtcattctcattgtccaggaaacgttttctccactctccatgtgaaagctgttatctctcgtgccagatacaacttctctgggacccgatcatcctcaccccgtagctcaatcacgttgcatgtctggatccctgtggaaaaccaattgtgttcttcagagtgtggctggaaagtctgtggtgagatacaaagacactgggtcctccacatataccattcagtcactctccactaccttaaattgtgcaccgatcactctgaccctgtcatactcggtaggtatagcataggagctgaaatgaaagaaacaggtccagtttactgagctctgtataatcacaaccctttcccataaagacaacgggattgacttgggttgctatagtaaggaccagcaagctcaccagtgtcagagctggtgcagggaagcatttccatattaatgaactttgccaagtataatttgcatattagtactgagctgaaatgactaatgaatgggttttaatagatgtatctgtctatgtaaccacagccacccagtaccagtcaaaatacaggacatttctcacatgctctcttttccctagaaggtgactctttgatccctggttagtgtttttgtcaccactgatctttcatctaggtatgcacacaccactgttggtgaagacgccatgctgaaaagagagtagctggttccaggcaggaggcaagcagtttcttggaatcaatgtccgcagttaataaaggacatgaatggggagacagtgtgtttagaacttttcttaattgcatgtatttatttctgtgtgatgtgtgtggggctgtgtgcgcatgtgccacttcgtacacgtggcagtcagaggacaacttgcggtagtccgtgttttccttctagcatgtgagttctggggcttgaagtcaggttgctggtcttggcagcaagtgactttaccctgtgagccatctcactggcccaaagacctagatcataaaggtgataaatctgccttcagctccccgtatccatctatctattccgagatctttctgtctggcctgtgaggtattatcagaaccatagtgagaggcctgaagaaaccctgtgactattgcagacgagtgctcctgcacatgactttatctaggaaactcatggcttcaaggagatgggcaggtagatggtgaaggcaaaagctccatgctcccatgcattcgggtaacagaaaaagggaaaggcgctctccccatccattcagaaataaatcaagatggggaccttgtgcttgctagcgggtgttgtgtcctctttcccacagcatgaggggagctgtcctagtccaagagtgtgaacttagtaagtgggtttgcttgggctgtatgttctgagagggcacttggcgtttcattcagttgtgacacctaagtttacacacctttgcttgttgtcatctgacttgggagtttgctctgatattcttttctaaactgtcctcttggttaggaaggaggtccctgtggtaccacctaggagacagtaagaaatgaaagctactgaattgaatgaaagaaaccaaattaagtctgacacatataaccctgaataggcatttctttgcagaccttacttaggcctaggaggaacagttgagaactgtcgcaccgtgtggcttactggacaggccgggtctgtcttcagggcagactctcccctactccagctcaaggcccctcttcctcttcactttggaccagccgagagacacttctgggcaaggaaccatagtgcagtccttagttctgttggcaacacaccaaacacagaatgaccttggccaacaaccagcagcagttctggaaatgcctttgtcatttctgagctgggctgcatccacagacaaacctagccctgacacttggaatgcctgaggctcaacagacttgactggcttggctgctggtgaactcctagaccaccctctctattttaaagcaaggtgcctgaagttggaagaccgagccttcaccagggcagctcatgtagcaagcaatttcacaagcaatcagataatgacggcttggaggggtttctggactactgacatctgtacccagtttgtggttttgcctggctggtgagacctttgcctcgatagctttagactttaatagtataggaaaatcaagacacggtgttcctcagaacccaagagaagcagagatggtgggtcaagcagtgtttgttcactcagggatcaggagacaaagctgagtcttgggaagtggctgtcatccttcaggctcaaatcactttgcaaagagctaaattacttcctactcaaaccattgacccaagggaccactatgaactacagctctgatgtgacaagaggactctacctgtctcaagagtgagggtttttctccaaaggatttggactagggatgtaactctgaggtagagcactggaattgcacacaggcccaagctcataggtttgatcccatgtatggcagtgaattaaaaaaaaaattcccaactttccccatgcttttccaagctaagagtattcatttttggcatgacagtatcggaaaatattcacttaggaccaattccttattttgatctctccaccaaattattgcttcctggggctcacggcacaaaggcatggggtcagccgaatctcctgataccatgccttgcctctctggcctttcacaatgtcattgcttgaaaaagcttgcagtggctcataggtagaaaattctctacaaagtggcagcctaaccaggaatgttcactatagtggccatcataaaagacttggccttttggttatcattttgacccttgaatactgggagtcagggtgggagctttagtgaggtccccaaaatcttcagacaccaaaagaccaaagtgaagggtgagctattttaaatttagagatagatgccagagggatcccgcacaatgagcccagaataattccagtagtcatgagctaccttaaggcttcccacttttttattcctaaaccataagcccccatgaccttgagaaaacccaaaagcacatgagtgacctggcctgagattacctaatgcaaactatcatcaggcctgagctttcactgaggagagagataggattgacgaagacaagcttggcctgtagagcctcatcttccatcccagctgagactaactccatggacctcaatgctggcttttcattacactgacttcactaaagggaggaaatgctaggaaactattttgcctgcttgctttttatctaagggcagctattaacccttgagtttcaagcaatttttagatcccaaacaactcatacaggggcactgggagagcaatcttctttccagattccaaatcctgcatgcccacacaaactgtgttcatttcctctggaaaacacttgactgtgctctggttgtctcatggaaagataacactggattcttacttggaaatgaacataaaatttggggcccatctataagtgacagtattctttgggttccatttatgttccccatttcaagggaccacaacatttttccagagaagaatcctccttcatcatttgatatccatcattaggcaatctggatcacacagaaatcttactaattctaagaaatgataatgcagcatctaatcgggataaattctgagcagtaattcttgtgtttttagtatgtattctaatacttttgatgattttatagaatatgtaaaaggctttcttctattcttaaaaatcctggtttattatgtatctttataaaaattgagacaaaaatacaaaaaagtgtaaagcataagaaacagttatgggggggcaggagagatggctcagaggttaagagcgcccactgctcttccagaggtcctgagttcaattcccagcaaccacatggtggctcacaaccatccattatgagatctggtgccctcttctggtgtgcagatatacatggaagcagaatgttgtatacataataaataaataaaatctttaaaaaaagaaaaaagaaacagttatgggtattattttaaataaaaataaaaattacagattcaaactaaatcctacttaccaacctgtcacattggacagaaacagctaagattataaatgtagcatgtattcttaagacatttgtgaatcctgttttcatgtatcgttacagatcaaaagacaccaaaaatatgtgtgttttaagtggtcacaaggacaatacatcccacatatttttctacctcttatctcagaggctctttttgtgtactgcctaacattttggcatatatatatatatatatgccaaaataatataatatattatttatattatattatttatatttatattataatatatttaatatattataataaatataattgtatttataatataataaataatatatatgtcattcacttatcaaatccggactcctttcccaccatcccccttcccaacttccagcagtcattagtcactactcatgcctacccttttgtagcacctacatatgagcaagaatttgatacttatctttctgatctgccttattttgttcaatacggtgtcctctcatcccatccattttgctgcaggtgacactttcattctctgtggctaaacaacagccctttgctcatgtatgttcagcatttcattctttaacgtgcagatagacacttaggctaactccatgtcttacttgttgtgagcagtgctattgttcctgaactccgttttttcatcttgactttttatcctttcctgcagaagcttcttttgggtaagagtcagctagctttctcaggctttatatataaatgtatttaataaatatattcaaatgtatttgcatcacctttcatctcaaacaattacttatctggagttaaagttctatcctgtctgtgttcctccaaaaacactttggaaacatgttccatcttcgcctgacgcttgttgcttccaaggagaaagtctgcagtctgtctaaacacatgacttctcccttggctctattatgctttctttctatgtgggctttcaggaagaactcctaatctcttttcactaaaatgtatctgtgttgagaattgtttttatcttgatcatgactcagtgtgattttggtttttaaatcttaggtgttttctttggttttgagaaactctcatgggttctctctcctgtgttctgggccccaactgtaataaacagccccatcctgtttctattgtccgcatcttttactctgtgctctgaggctctgtgctgctctctttcagtattccagtcagttcacctccatttctcatatttttctcttgctccgttttcaagtcctgttgtaaccgcttcataatctcctcttggagttagtttgtatcctttctttttgcaatggaaatattaccttaggattattctaagatatgctattccttgtcccatatgccttacacctcccattataggatgattggcaggaatattttaaagacactgttcaatttttattaccaagttaaaactatttttgtttgttttggttcggtttttaatctgccacaaggaaacaaggcagacgtccaggtccccgtgagtatatggcaatcaggtttatggtctaagccagaattggaaaggaggatgccattagccaggagaaggcagctgcaagctcaccattacaaggccttggtcataggcaggcctagttgcactatgtatgactttcatagccacacctggccccgcacctgctgctgttgatattgtaaaattcctaatgagttttaacaaagagctctttttcattatgtagcttgtcctatactagaggaagtctggaggagacaggaagaggaaatagaagaaaaactgaattgtgttgatgcccagcattgtgagcagaagggatacagaagcaggagagaccctgggtgagacttgtgggtttcccctctcctgtcagagaaagaaagaattttgtatggattaagaacaacacagaagggggtgtcctttagtttcatggaacaatttggattcttgaaaaggaatttggtctcctctccacctcaggcagagtataaaaaagtgtgacaaactcttaaaataagaacatttacttttcaaagagatctagaacaggatgattttaaacttatactgtactcaagtaaataaaacatttagtataaaaaagtgtctattaatggacctaattttcatcaatagttcccattcatatacagacagataaaaaactaaaactttaagtcaaatccaataaacttggcctcatgtaaacagttgcctttaagtttaattttcacccttttgatttagacatgcccaggtcttcacatgtctcgtgtcccctgtgtgctccaaggtggtatgtggaatactgagaggatacagcaatatggtcaggtggtgactgatgaaggcaggaagtctcccattttcacagggctctgtgagggttctgggtcctcattaacttctgccataatagaaatctgtggttgcctggaccacttattactctggtacatactttccattatgttgcaatgaactgggtatctctgaggcagtatagtttgctacccaaatctcagttgagtctaagctgccccactgctcctccatagtcccttcctcattctctagaacaccagggctgtccctgcagcttctggggaataggaccttgtttttgccaatacaggcccaatacaaagattatggactccagctcctcgtcttccagataaatcaaaggttaacggccagcacatgagggctctgtggtatcacattctgtccccataatgggttgcttgcttcttccattcaggcacttcatggtggattctctatttttcttttcaaacacagtttgaaaatatgctcctccccttattttattcaatgtttctcaatgtttaaaagttcttctatatcttctaaatcattttcttctaaattctgctggtaacatatgctaaaacccctctttcccagggattactcagtcctttattagaagtgagatactgactcctagaaagccactcttctttccttcactgtctagctgtgtggactgaggaaaaatactagatgagatgctggcagccgtcttggattatgaccataaagatgaagaacctcagtccttgatgacactttgaaggcagcatattagccctagatggtctacttctgcactgttatagtgagagcggtcaatttcggcttgaattagtttgctgtcactgtagtcaggcaccctgaagacagagagctttatctcagctcatggttccagaggcttgagtcatggtctgctacctcattgcacttgagcctgtggtgcagaagagcaccacagcgggagcacatggctgaagaaactgcctatctcatggcagtcagaaggcagagagataaggaactaggttccaatagccctttcaaatgcatgttcctaattccccaacttccttctctcagccctacatcctaaaggtccactcctcatagtagtgctgcaggctgaggccgagactctaacacagagccttcagctatactccagaaacaaactacagcactagtctatgattatctggacctctgtttttaagatttattttttattttatgtttatgtttatgggtgtgtgttttgcctctgcatgtctgtgtaccacatgcatgcaggtaccctagaggccagaagagagcatcacttttcctggcactggagttagagatggtcgtgagccactgtgtgggtgctgggaatcaaattcaagtcctctggaagagcagatagggctcttaatccctgagccattgttccacttccctgaaattctgcttatttgtgttttaaattgacagacaaaattgcatttattgtgtgaagcacaatgtttaaaaatgcatatattgtgaaacagctaaatctacaagcattatctcccagagttataacctttgtagtaagacagtttaaaatatgttctcttagtgtgcttgggggatggtttccacattacacaatagagctttctaacttattcctgctctccaactgaaattttgtattcttcagccaacattactttcttttgtatatgcagatgagccaaattttgacaggtacttagactggtgttaattgttgctttgattagctgtgctgcacttaacgtagttgttcaaacatttctgctcatttgcctgagagtttctattgttgttgttttgagacaaggtctcactgagtagcccttactgtcctggaactttctctgcagaccaagctggcctcagactcaagatctacctgcctctgcctcctcaggactgggattaaaggtgtgtgccaccatgcccaactttttgttttgtcttttttgtttgtttgcctctctctctctctttctctctctctctctctctctctctctctctctctctctctctctctccctctctctcgttagaaatctagactatctttagagaatgataaaagatttgggaacattttacattattttttgaaacatttccctttattttggagtgagtcctctgtggagatcctttagagctaagaacactagaggtgagactgcatgtcgcaaatgtgcctgatactccactcagtgggttctgctactagaatgtctaatgagccacgctgaaatgtaattaaaggcaaaacccacaaatagctatgtataagcttgccaggtagttatttttaagattttcattagcactaagctgtaagtacaccaaaacacacatccaaaacctcccataaagttgattcctttacctgattttcatgcagtccatattacctgagagatgacgggtgttagtggatggtgtagaaccacactttagcacacacaaaagcccagtgaaagcccatcgggaagttggattcttgccttccactttgtgtgtaatttgcatacacaccatgtttacatttctgactcagttggtctgacgaaagttgcatccaggaatgtagcacaaataatataaacccagagacagatattggggttcaagatgaagatcagaaaagcaaagcagccaagctaccagagagctctcacctctatcaaggctaggtagatcctgtcctcaacctggctggagactaattgcctaagactgaatgccgatgactgagtactgaatggcagctctgagttcctgctcctgtcttatatacctctctagtgctgggattaaaggtgtgggccctgtttctcttttagactgattcactctcatgtagccctgggtggccttgaactcatagagatctgcctgcctctgtctcctgagtcctgggattaaaagtgtgtgctatcactgcctagcctctatggctgtgctagctttgcattctgatctcgggcaatctttattagatcaaaaacaacatatcaccacacaggaatgtgctccgtaccaggtatatcactatgaaatttgacccatacactttaaagacctctcaaccatggcaggaaaccccgtccattagcagaccttgctgccttcacgcttactagtagcacctgaggagctgaccaagaatggacatggaggtacagcagggacagtcaattctgcattattccactagtggattgacagcttgtgattgtggatgtaaagtaatggccgcctttatgaataatggatatgatatttgagggattatttaatgtattttttattctctttaaatcaagatgccatatggctccctatccttttaatcaatgagtttcaatgcttcgggggcaggacagtcactggctagaacaccaaagtcatcgctcagctttgactgtcaaatgaagctttttatgtatcgtatccccagggggagagagctgttgaaagccaggctgcatcaagagagaaaaagaatttctaaatttccaaccctccctttatatatcattcatttctaatcttattggattcttattagaaaatgaagcctgtaaaagctccactcttcatattttcttgagctctttttttttttgcagccgagaacaagatgcattcatgttgtgcgtctttcctgaatgtcaagttctctaactattaaaacaaggaagcttattgtaatatccagctcttctgtgtctgtatttattttctgccttctagatctcgctgctttgaaatatcctagacccctttgaattttattcattcttttaggatattgaatattctttttgaatttaaatttcattttatcaaagcaatgttcttttgtagttaaattgttcagtgatgcttaaaacaacaagaaaaaacaaaacacgcccccctccatcgaaataccaaccacatagtcctctgtctcgtgtcttcatttcttcaagtcctcactgcccaggataactactttaatctctttttgctttatgttttgctggttatctccatattttaaaattgcatataactttggctttttaaatataagtgctattattgaataagtcatttggtaaatgactttggaaagaaaatgaaataagtgtaaaccgtattaggagtattctaaagatgaggcagaaagtggggtgtataaacaggaatgaaaaaaagatgtaggtccaaggtaggaagggaatttcaggatgctaagtttaaaaggcatcagtggaaccagtgagaattcactaaaccattgtgccaagcaaggttcagctgttgttcttagggaatggattacacaggcacggacgtagctaagagcactgtagaaagtgtttggaagccttctgttagtgtatgtccactaacaagttgcctggtcttagaattaatgtgtcccatgaactggatgaaaccaagaatgaatgaagaaggttttgagggggagaaaagaagtaagtcatgctgggcagcaggatctgtgctgccttgaagtcctgttggagtcactgagcttgaggggaatacaggctatggctctttgcatctgccaacctgggcaaggagggttggacctactgaaactcaagcatagccacatgagtgcaagtttgtgatctaagagtagaggttttcatccaggcttccgtgaggggaggttgggaaaactctttggtgtgggcgttgcccaagtgatactttggaaatgactaaaatggatgaaggtggtgggaaagggcaatcttagctcaaagcgcattgcatgtgtctgtggggcagagaatgccaccaggcaaatctgtcccccagagggaacacaggatggttaagagaacaaacggacccgaggaggatcagccagaggttaccccggataaccagctccagatgagggggctagcatggactccaaaatttcagatgggctctggtccttatgccaccaggttcaattgtctaaagggaagattagaccaactgccccactgggatgaaagcaaggatgtggatatcagcacacagaccccttgctctcactcctgctgccctgccatcataaacacactagacccaggggacagcttgacaaggaaaaggaagaggatgtatcttgaaagatgggaatttattttctttagtaactactacctcaattgcaggcaggctaccagcagtgagactgggtggttcccacagtccttcctatcatttgccttttcttgataggcatgagtcacaggtaattaaatagccaagcctatgtgactctacttatcgataacaatctaacatcatacagaattacaaaattaatccaaatcatttatacattacatacttagcagttacatactgcagtttacgagtttgaaaagaagtaatttacctaaaatacaggaagatttaatttgcacactttagaatatcactgtaatgccctattattaaaactgatatgaaaatgtaacatttaatatctagctttagggctttttaagttgtagaaaatatatttttttaaacaaaacttatgagaaaggcattctgaaatatgtcaaatagaatgaagaaactatcagtgagtatcttactactgaaagaaatgtgtcagttgtgttttctttttttaatttccagcttttgctgtatgaaatttatcaatagcagttaccctatttatcaacatccataagttttctgtatcagggaaaaaagtaaaatttttaaagtgaaaaaaaaagaaagatgggaatttatcccaaagacactggagacaaagaaaattctatcagctatcccttaactggtcagttgaagccttccccaagctacctccctcacttctactgagctcagaagccagataggagccagccgcatggctcagtaggtaaaggtgcctctaagcccagagacccgaattcagtccctaggtcctacatggtgaaagttatgaaccaacttctgaaagctacccttccacttccatgtctacacacacacacacacacacacacacacacacacacacacacactcacacacactcactcacactcacacacactcacacacactcacacacacactcacacacacacacacacacacacacacacacacacacacacacgtaatgtgaaaaagtcatgataccagacatgggaagcaaagcaaagagactttttttccataattgatttgtaatttctaaagttctgagaacagacatttcagattattcagaggtttagaaggcacacagtccttctgttccccagtggtatttacaacctggccatataagcaaaagagaataggttcagacattatagggaaataccaacttcttgctaatctaacccatgaggacactgtgacgtcactaaagagcaagaagcagggcctcctgtgacagctggcattaagtgtggcctcgaatctttgtgagttgactatggccaatacagatatgtctgttcttaagtccactctatagaatgggcaccaaaataagctcccctttgggttgaatttctttgattgctttggggttttgtttgtttggtgtttttgagacaaggtctcactatgtgtaccccttggctggcctgaaagtcactgtgtacaccaggctggcttgagtttatagagaaccacctgcctctgcctcccctccctgttgcttggattaaaagcttgcactatcacactggcatgtcttgtttttggtttgtttgttgttgttgtttttctttttttctttctttttttttcttgttttttgagatagggtttctctgtgtagctttggagcctatcctggcatttgctctgtagaccaggctggccttgagtttatagagatccgcctgctctgcctcccctccctgttgctgggattaaaagcttgcactatcacactggcatgtcttgttttttttttttttgtttgtttgtttgttgttgttgtttttctttctttttttgtttattgttttttgaggcagggtttctctgtgtagctttggagcctatcctggcatttgctctgtagaccaggctggccttgaactcacagagatccacctgcctctgcctcccgagtgctgggattaaaggcgtgcaccaccaacacctggctttgtttttgttttttgagattgtgtagacttgtgtagtctctgtgtagacttggctggactggtaatcactctgtaggccaggctagcctcaaactcacagagatctgcttgcctctgcctctgcctctgcctctgcctccctagtgctggggttaaaggtgtgtgccactactgcctggccatgtcttgttttcaaatgaaactttttatggctctctggggatttgacaagttgaggggctttccaggtttttactttgattaggtgcatcagggatcactacccatcaactcttgacctacaactagatgtcactgaagcctggattcacactatagatgctggaggatttttagttattcaacacagcctaaagatcaccacagcccaggagactcctgactgctgaggcaggggaaatggggagacatagcacagtggctttgccactgccctgtgcaatgggacaaaaagagcattgagggctattccccatggaatgaagatggcgttatttgaaaaacagggacagtcagaagcacattaagtcacatttccattttactaggagtccagcatggcagatggtatcaccttagactggtgtcaggtggtgtctggcttggacagtcgctattcctggagtcttagtctactggagcagttataagataaaacactctcggtggagcagcttatgaacagtgggggatgggttcaaggtcaaggtgctcgaagactggacaccaagtacagacttactttctggtaaacatgaagagtctttctgctctgttcccacatggtggaagtggcatgggacctgcctttcacaagtgcacccatctctcctgacttaatagttcccccaagttccaagtgattccatatgagggttgaggccccaacatagaagccacaaacatttagaccgtagctctgagacttctcccccaattcattcctgctaagttacaataaggagaaaagagtacagattgaaagtaacaactatttactacatgtccacaaagtggttgccattttaaacagaaatgatgaaactaccaatagtctgcactagtagtttccaattttttttcctcaatagtctatggttaaaatggaaaaaaaaaaaaacaacgtgatttagatggacagcttttaaatagactattcgtcagaatatcctacagggcttgttgaacatacacaccctggttttggacacttgtgtagtttattaaggtctattggtgattgacccaggacgatagctggggtcaatcagatcagaatttctgcttaggtaggtcctgctcgataaagaatctcaacctgggattctaacatgcttctaaggttggcactctggttggtcctattatctaaagtgcttatcaaaaaccccagtgcccagcccccactgaagtcattctgaatcaagttctcactgcatgaggcccaggaatgtaaaccctagaaaagcccacaggtgcccaggtgcaggcgattttgagaaatgcagttctagattaataattcccaattttggttacgtgctggagccacgtgagataatttttaaagcactgacagcctggcccctggctgctctgattgagctggaatggtatgtggtctgctgaccatttcttaaggtctccaataacgtataaagcttgagagctgctggcacccaggcctgtggcttcaccatcacatcctggaaacttgctgaaatgcaaattcctaggctacaccctaggcctgctggagcagggtccctggaggtagaagccaacaagcttttgtcttaacaagccctccagggcattctgagccccacaaagggctgagaaccaggggattcaaccttgctcattagcactaatcaattagaaaggattaatggatcacattagctggttgacactttcagtcaaggggtttagcccaggtaatttcagtggagccactggggaaaggatggtaagatgtctctggttgtgtggagtgtatgtatgaggaaataacagctccagggtccaccacacatgcatgccctctaccaaaagagccccaaaacattcattaattagaaaaacaagccaagtgcttttgacagccgttccttcggttttggagaattgaatgttagtgactattggtgacgtcctgttaaaattcagcttcctgtgccagacaccagtagattctgcttctttggatatgggatgggtacctgggaatagcattttacacaagcacctatgctactgtgagttaagcggtgggcaaagcaatcagaaaacaaacaacaaacaaaaaatcccatggctttatgggtttgttgcctcaagttctgtgggaaaggcttggaagtccttcagctttcagcccactttagcagcaaaaggtctgaggtcctctcctccatcagtatgtatcaagcccctgtcacgtgtataaagtcacttggcagggctcagcctctctatcgggttctgaagcatggctttggtgccagggagaagggtcttttgtcttgtttttttttttttttttctttaattcctttgtcgcattgatgtctgtctttgagactgcactgaggcaacctcgtcgtcgtcctctcttaggaaactttgctgtaatgaaaagtccaatttgcttcacctgcccctgagtagcaaattatgggaccactggaaccgcaaaggtacctttcctgatgaagtccaaaacactacacatatttggcctctaggcggagctagccttcaggaaaacaaggctgtttatgtaacagattggcagtttaagcggctgtataaatgtcattctttaaaaataaagaagaaatctcagttaactcaaacaggagcaaattaaaaagtagagcgaaacatctatttcacgaacacaattcatccgctgtctctggtacttcaaattgataccttttctccaaatgataactggcaccctcccactggctttagctgcgccgtgacaaaacaacagatcaatccactcacttcagtgaagaagaaaaatccagtcagttagaaacggcttcatgtgcctcatacacctggagacagaatgatttctaagccaccaaatacaaaagccaagccactaaaccatggcggagatgttgagtttatccccaaaatgtatttaggaagttttgtattgagaccctccactgtcttaagcttgattctctctccttgtgactcaccaggagggtccttgaaataccaattttcaacagtcttaaggggatatctataacacatagagccttcttgtctcgagggctttgtggccagtctgagatcgaaatgttagcttcaaaatggaatcgcacaggggtcttcggaaaatcctaaggctcaggtataacccagaccaattaagtaaggatccagagatagactcctggatgcagggttctgagccttcactgctgttgtccaaagcaccttcagcagtataaaaataagggtttttaaatgttcttttatttttaagaccaattctctctatccgttgccctggctatcatggaactcactgtgtagaccaggctggcctccaactcacagagatctgcctgcctctgcctcccaagtgctggatcaaaggtgtgcattatgaaatggtatggctcctgcctaaagtaaggatgtatgagactggtggcttttttcctctcatcgaaggtctttcccgctgaggctcagaacttgttcttggagactcagtacagctgacaaggtccagtgctcacactgcctttcctcagatctttctccttgatgactactccagccctcatgctaattcctaatgggccaatcccagtatctcactcccttcatttttggacttgcctgaagtccaacaatggccacatctatggggaccacatctatggaccacaactatggggacttcctacacagctacaaatggatcaatatgaaagacagttcataaaatgctccaattactggctcataggttaatcaagcagtagagtgcttgcctagtgtcttagttccttttctattgctatgggaaacttatgtgacaaaagcaacttataaaagaaagcatttaattataggctcatggttccagagggtcagagttcatgaccagtatggaaaggagcatggcagcaaacagacaggcatggtgctggagaagtagctgagaccttacttcatactcgcaggcatgaggcagagagaaagctaactggaatggcttggacaagtcagatctcaaagcccacctccagtgacacacctcctccaagaccacacctcctaatccttcccaaacagtttcactgactggagaccaagattacaaatgtctgagcctatgaggccattctcattcaaaccgccacacctataatgcagtagtccctgggctctgttctcagcaccgcaggtaaagaaaaggggcccatggaggaagatctggaaagctgtgtcctattgagctaagtttggggacatcaattgactccattacctccaatatgaatcagtaacagactctcatagatgcgattttcccaaggtcactcagttagctaagagcagagccacagttagaatccagtgctatgactcatgaaaagaggtcacattgtggataaccagcttttgtgtttcaaaataataataataaaaaaaaccctcagatgtcaactggataaacaaaacccccaaacttcccttgtttttgtcaggtattctgttacaacaacaagaaagtaactaatatagtctcccatgaatcaccttgctctctcactagttggatgttggagaaatagcaaagttcccagggaagtggcacccaggttctagctcccactaaagcacacattccatctgatttgtggtttggggcaggtactttcctcttctctgacctttggcttctttatctttccaatgaggtgatacttggctcacagtgatggtgaacatggggaaacagtttataaaagatgagaacatattataagaggtatagaacataccaagtaaacactcaacactggacacgacagctgccactattatcatcaagcaatcagcattgtctctgactttgtaaccttgtaggagagagccagaatgatggggcaagagagtgccatcttgctactttagtttggtctaaaggagtgtatcagagagaatacctggaggagtttttcattaaatatatttttctgagtataatggaaatatatatcactctaggcaatgcctacatggcagtggagactgattctgcattcacatgagacgagatgctgtttggagaccctcatcatctatgtcacttatgaataacacactagggaggatggcaactcggaggcacacagtgactcatttatgatcccagtcccacatctgctgacccagatatgctaagcctccattccctgctctttcttctccatcatctgccactaaggaaattctcctatcagcaaaatttatcatcagttgtcacagatgtgttttactccttaagtttttttggatctggccacacacaccatggcagtgatgaggggatggattaccacatcctcttaaatcttgttctggtgggtaagggactgaagggcttcctacagagtcaggcccctaagacagggaaatggactccagacatttaggttaaactaaaccctaggcagtggttctcaaccttcctaatgccgagacccttgaatatagtccctcattctgtggtgacccccaaccataaaattattttgtttgtactttattactgtaattttgctactgctatgaatccatataaatatctgatatacaggatatctgatatgccagggtggttgactgctacccacgggttgagaaccacttccctaagcaatgcccaaaatgtccccttcagacaccaagtcacagagggcactgccagtgaaatgccagactgggcagatggtcgggaatgaaaccagagccacaatctctctcatttctacccctcaaggcttcatttcccttggtggtagagactttgaccaccactagaggtatttcttatgcttcacatatctttcactaataaatacacactaagacaagcaataagggtgggtgggaagcgctcctctgcggagaactgttctcgttttaattgtatgttgaatgggatgggagtgaccccgcggccagccatgcttttgaaagtgtgaagcaggaaagtgccatggtcacagcctctctcccagagtagtcttctgtggtgtctttgtgcgtcccaatgagtgctgccccttctaaaggtgttgctgtcaatggagggagccagaaagtgacaggagagggtgggcgaagcagtatgaagacggccactggagaggcctcatgcgcactggctggagctactggctgtttggcattcacctaggtaacctgttgccaggaggacaatgacttccccatgacaacaccagagcaaggtctctcgaattataaacagggccagcaaagtccaccctcgagtgggcctgctgcttaataagcacacattagcactcccaccgtttccagaaggctggaggggccagagggcactcagctgcttcccaccctctctagcacctagctccttgacaaccgtatcttgtctgcccgcccacacatcagctttcgctgttgcttgtactggggggctcttggcttcctttctcccttgcttgcatcaggactgaatgacatggcttcctgagaagcagattccaaagctgcccagggtttaagctatccagatgatcgtccactctcctgtcgacccagtatcttccccctgtaaaaaaacaaaaacaaaatcactagtcatttcttaaagctcagccaactggcatggaccacactgcccagtcacacagctctaactgagagtctctgattcaaattcaccccttctcgaaattacaagacaagcatactgtgtgtcttgtgaaggactcatgtttgtctctaagtacttaagaccctaaaaaagcctccctccttccctccctccctctccttattgaagccttcacttggttgaaacatgccagatgatttttaaggaaaccaagacattctcaatgcaaaatgattttacctagtggggcctgaaacggcgcttttctacaaagtggtgttcaaagctttataatattaccatttgtcttactaagatcttaccactcagatgtgaccctcagaatcaaatacatggaacaggaatttcccctgttctcatcactacacatctgtgcctacagcagcctttctcaatgatctgaagagagctagtagcataccctgaggaaacagtctcagcgccaggatgtctgggatacactgggttaagtcatgctgaacagacctctcttctggaccacagttctgcaggctaaactgggaaagtaaccctcagcaatgcagaaaagccacggggcaagatcgtactctgcctgacactcttaactgctcagaagcctagaaatttcactctgtctttcaagacaaagtattactctaatcggtgattactttttaagtttattttaattttatgtgcattgctgttttacctgcatgtatgtctgtgtgaggtcatcagaccttggagttacagacagctataagctgtcatgtgggtactaggaactgaacccgggtccactggaagaacaaccagtgctcttaaccgctgcaccattctctctagcccttaatgattcttaaacaaattaaaatatttttgcacgtgtacatgcactagtgtgtgtgtgaatatgcatacacatgtgtgagcctgtgtgtgtaggctgaaggccaacctctaatgctattctttaggagtcttctgcctttgtgttttgagacggggtctaggactcaccaatttgacaagacagtgagctgcagggatccacctgtctccacttccccggtgccaagcttggttttgacgtgggtgctggggattcaaactcagatcttcaggcttgcatagcaagagctttataaactgagccatctccccaacccctctgttgcttgttttctaacagggtttcatgtagctcaggctggccttgaactcctgagcctccagcttccacctcccaagtgctttacaggctttcactgccatctgtaacttcaaataaaaatttcaaaggtttagttctacagctgtaaaattataatattaataatacccctcacttaagattattctgaagcttgaaggagatagctaaaataatgtaatggacacagatgccatgaaggtatttccttttcattgaaacattccccagctagatggaagctcttccagcatgcatttcctcaggtctctttccaccgtcccttacttagaccactatactgcctgggcctcctaactgctcatctcacacctctcataacttttctttcccaacatcctagccttcttctaccaaagcctcttcttcctaccctacagataggaacttcatcccatctcttcctccttgctcatgagggaaagccacaagtgtgaacatggccacagccctagcagctgccccatgcctttcccagcatcatctggttctctggcctttttgctcaggttctccaaatctgctgctccttctgtgtcggaccctcccctctgccttcaccgaattctcagccattcttactctcacctcacacaccgcagccccatctcaccgcctgtttcactgacccctccatttgcctacttaatgtctcctcccatgtgtttctaagctttatacttactgagtgaaaacttcatgcccagtgttgtgccacaaatgcaacctgttcttgccctttggtgacgagaaaggaaaacctcactggcaggtagggccagccttacaacctgtcctgtctagagtgagcccgagaccctcctcctggcaggtgcctcctgcctcaataccctcctccaagtctttgtcttcactgtagctagaatctacttaataattgtgctaaatacatgcatattgttacagttaccattttaacctttaaaaaatgatgtgtgtatgtgagtttatgatgagtatgttcagtgcccacagaggccagaagggggctttgaatttaggaattggagttataggccacctgacatgggttccgggaactgaacctgtgtactctggaagaacagtgagtgctcttaatcactgcgcaatctctccagccccattttaacctctttgaagtgctcagcaccactgtacctccgtgtgcattcacactgcaatacagccatcaccaccagctagctccagaactttctgtggttcccagacaaaactctctgcctcccccctaataactgcttcctcctcaccaaacttttccagggatcagtattatgacttcgtttctccaaattttactactcaagataggtcccctcagtggaatcatgcaatatttatcttacagtgactattatttcactcaacattgtcttgaaggttcattccaggtgtcagaatttccctttcaaagctgaataattttccatcacattttatgtgtccaatcatccactgagggatatttgggttgcttacaccttttcactattgtgattacacaacagtgaacactagtgggcaaatgtctgttagcattgatttcattgacatgctatcagtgtgaggtcaaagggcattttccacttggtatagtggcatcatgaacagagccatagtttcttcccagcaagcatctacaaactcacctagttggccccatgtcagatagtctccctcctgagaaatttggcaagcacaagataagctgtggtcccatggggtttatacactcaagaggaaacgggctctgcatattgaaaagctacatttcaattaatcaaaattcagaagagtgagcttgctgtgcacctaagtgtcaaggaacatgtactggtctcctagtactgcagtaacacattttaagcatcttagcgttataacagtgcacccccctgcagttctagaggctcagagtctagcaccagtttcactgagttccagttaaagaatcaacaaagatggttccatctgagatgctgaggagagaatgccttccttgttttcttctttttcttctagctcttctagcctcctacatatattctacggactttctgcacttaactgatttgtggccccttctcccaagttcaaattgtcagccttgcctttactgttaccgtcacaatgctttcccctctgctttcctcttacatggaccactgagtttacatcaggccaccaagacaatcaattatccttgaatcataatatcttcagctgaatctatttaaaaagactcttttgccacataaggtaacatgattgcagatcccagagggcatatatctggagtggggttggggtgctatgccaggttgcctgcagaagctggcttgacagcaaggcagcatagtacaggtggatggggtgacattttcgagagcaggtgaatgtgtgctgtgtttatcacaatcatagagtaggtgataacaaagtaggaaccgagagacaggtgcctgagggtactgtgcacttacgctcttctgatacctgctggagcactctgacatttgcaagtgtttctcatcagcatccaatgtgttggtccttctaagttcgtgaaagtgcagtggcaaacactggcatacacgctgtacatctgcgacagagccactcctcagcaacacgcaccaggctctccaaagtggagtaatgtccagctctaggaacacatacagaatcagtttttcattctgttcctcagaggttacaccgtagttgacaaagtaaaaacaaaacatggcatatatggaaaatataacaagagttgattctaagcggcaagtgtcttgggtcgcttttctacaaagtgaagactgaagagggtggagagagaggcagccttctgatgagaagaaatctaggtgttttgcagggaagcaaaggatcatagaagaaagaagaacaatttgaagatcaagaaggggcctgggaaggtggcttagcgggtaagagtgcttgctttgcaagcatgaagaccagagttcaaatccctaactccatgtaaaatgttggctgtggctctgcaccgctagcactgtagagagcagagactagagatttcactgatggcttccagcctcgctctgggtccagtgagacttcgtctcaagagagtaaggtctgacatcctctctggcctccacatgagtttgagagggtgaaggtgcacctgcaccccctcacatgcgcacatgctaaccctgtcccaaatagacaagtaggtgttttgaaggatgggtgggcagaaatcccaagcacctctgaatgtctagtagacggcccagggaaagatgagctgtatggcgtgttgttccttgagtctttgcttcttccgagtttgcccaaatgctctctgccctagtacattttacagccttctggtcaccactttaggggataatttctcctttaaagtggttttgattgggagcatggggggaggggagagggagctaggagaatgagaaggggaaaagagaaggagtgaggacatgagggagcaggaaggttgagttgggggaagaatagaggagaacaaggtaagagataccataatagagggagccattataggtttaaagaggaaccaggcactagggaaatgtccggagatctacaaggatgacaccaactaacaatctaagcaacagtggagaggctaccttaaatgccctcccctgataatgagattgatgattgacttatatgccatcctatagccttcatccagcagctgatggaagtagcagcagacatacacagctaaacactgaactgaactggaatccagttgcagagaaagaggagtgatgagcaaagggtggtaaaaacccacagaaacagctgacctgaacaagggagagctcttggtccccagactggtagctgggaaaccagcatgggactgatcctagcataggaatggactttgggagcccattccacatagaaggatactccctgatacacgtgggggaggggctaggcactatcccaaaggatacaacaaactctgaagaccccctatggaaggcctcaccctccctggggagcagaaagggtatgggagaggtagggtttagttgaggaggggcaggggaagcaggcagggagggagagggaacttggattgacatgtaaaacaatcttgtttctaatttaaataaaaaatggagaaaaacaaacaaacaaaaaataaagtggttttgggggagcttgccactcgccaggaacacacaacagctccagagtaggtcctgtgataacaccaaggagaaaagtctggttaggtctgtgtttggaggcaggaggatgctggggctgcagcaccatgggaatgtcatagcatccagctgctgactggagaagttaccagctgtgtggctgatgtaatttacttcacatttcttaattctgttcccatatggaaaatggagacaaaagtaacatcctccatatcaggctactgccaatgaacaaagtgtctgacatgttacccaacacacagtaagtcctcaatgaagcctaactcctactgggtgcataaggtacatctttaagagtttaaagcaaggtaggaaaaagtggtaattcatgttaagcatttttttttttttggaacttaaaacaaatctcccaaagccaaaacaaatcaagtgacttacagaaaatggtgcaaaacagatcaagtgatttacagaaaatggtgcttactgagtcattggcaggcatcctgttttcttgcattctccgtagtgatttatgtgaatcctggaatatgtgttcatattgacctcagtctctttatgagaagatatttcagaattgagatgtgctgccaagtgtgtgtgtgtgtgtgtgtgtgtgtgtgtgtgtgtgtgtgtgtgtttggtgacacacttgagaaggaacatcaatcatactaccagctgccatgatataaccagcattcacacagcctgctacaattggactgtgtgagagcatctcatatcataaaggtactcaggacacagccgatggggctatgtaagtcagatataatcattaatcccattttgctgatggaaacactgaggttgaaagaatctctgcatccaagggaacacaggaaataaaaaagcaaaactctgactccacatcctctgccttcagggaagccagaaccaccgtgaaatgttttaaaacatcagcactcccaggctacatagccagtgagtgttctctttccttgtggtcacttctgggtgctctgtgctattttgaaagtatgacttctacacaaccatatccagaatgcttttcaagttcattctctctctctcctcccccacctcctcctcctcctcctcctcctctctctctctctctctctctctctctctctctctctctctctctcacacacacacacacacacacacacacacacacacacacacatctccccatgcacaagcatgtttgactactcttggttctcctcactgtcccaggtattcactgatagaagtcccaaataactttcttataaatctattttgttggtgaggcttgagatcagtgaagatacccaagtaaaatcagagtttctaatgatctatccaaaagattttcaaccagaataacagtgggggaataggaaaaacaacgcataactccctgggagactgctttgaatgtcatcccatatttgggacatgaaagttctcctgtgtttctgtacacatgaagatcttgtcactatcatttgtggttttagaaagtcactttttgcaattccctttagttgagaaatgagacttggaaaggggacagatgacctctatacctgatgagctctcaggaaaacctgatggctgtggccaagagataaccaccagctaaagtccaactcagggagcagcactcaccagtgccaggctgcccctccgcaattatctcaacactcagctccctcccgcatccgacaaagcagagactatgaccaattggtaggtgagagaggattaggaatggagagggcagagaacctcaacaaaaagaaaaaagcagaaggggaagagagttgtaggacttctggggaaatgcaaacaaacacctattttcttgagcttaagacactgtctttgttagggtttctgttgctgtgaagagacaccatgaccatgccaactcttataaaggaaaacattttattggggtgtctcacttacagtttcagccgttcagtacattaccatcatggtggggagcatggcatgcaagcagacatggtgctggagaggtagctgagagtcctacatcatgcaagcaataagaaatggtctgacagtcacactgggggaagcttgagcaaaagagacctcaaagcccacccctacagtgacacacttcctccaacaaggccatatctattctaacaaagccatgcctcctaatagtgctgttccctttgaggattatttcctttcaaatcagcacagacactaatgaaaaaaaccaagagaaagctttgcccttgacttagtgaaccagcaatactaatgaaatttgggtgaggggtcacttacctgagcatggataactcaaaggttgctgcatccctgaaagccccagcagggacagcaactcataaaagctttatctttggaagtaaatagacagataggttatatcctctccccaatagtcttagactacttatatgacctggcgggggcgggcttgttgtaaatcttgtaaatttcaggaacttgagacttgtgagttgtttacttttaacatttaaagggactttcttccaggacagagtgttcaatttagaggaaattcctacaaattgggtttgggggtggtattcacatctggtggaactcttgggaggctgaggcaggacaatcactaattccaggtcagcctataaaactctctctgaaaacatacaaacaaaaaccaggatcagcaagctgactcatcaggtaaaggcacttgtcaccaagcctgactacctggcctgagtccaatacttaggatctacacggtaggagagaagtactcctgcatgcacactcaaaaccaataaataatcataatgacaatttcgctaagagatggcacggtggttatgagcattgactgcttttccagatcatacagattcaaatcccagcaaccatacggtggctaacaatagtctataatcccagttccaaggtgatctgacaccccatggtggcctgtactggcactgtatgcacacgacacatatacatatatgctaagaaaacacatacacataaaataaaaataaatatatctttaaaaaatgaacaattgtaatttttaaaaagtcaggacaaggaaacaccctaaacaaagggcagcaaagaatgtttacttcttcctcccttaatactcccccaattaaacttcaaaatcacttctccttccaagggaaaactaagcaatgagagtgaggggaaagtatcagacctggaaaagccagggttggtgggaaggaattcccctctcatattttccatttctgtttagcgtgaacaccatttccccaaggatggtgtgggtctcatataacaagaaagagggtcacttcccagattcacacagtagatggtaatgaaaacctaggtctgacagcaaaggctgcatgcatatttccaaccaccaaggatatttgctggtttgcaaatgagccttgtgtcagtccctgagtcaataggtccttttgcccggagaaatctgaacaggctttttgaggaacagagcatttggcatgaggtttggataggcttgagaagttgacagaaggactctttagaaagtgtgagcattcatgagtgtgtttgtgcatgcacgtgcgcctacacacacacacacacacacacacacacacacacacacacacacacacacacagcataagcaaagggaaggtaagagagttgtaggtcagcattgggaacagagagttagttgcacagtgctgcttttctcaactctggttgtacacacaggagtacggaggtctgggctgcaatactgcaggaagcccctttctcaatagagagtagaagtgagcagacaaaaggcgtcagtcagacctaagcaagaatgtttgagcctagaaaactaaaagaataatgatgacattgaaaatatgaggtgtgccaggcatggtggagcatacctttaaccctagcactcacagtacagaggcagaaggctctctgggagtttgaagccagcctggtctacaaagtctacaaagtcagttctcggccagccagggctaaacaatgacaccctgtctaaaactaataagtaataatagatttctgaaaagcagcaagactagtttgacagtcattatctgtaagaatgtgtaatgagtattcttgttatgtgcttcacagttaatccaagttgataccctctataatttcttgttgcttctattatcacaaacagtgactcaaaagcaaaaagaaaataaaaatcattcttgaagacttaaaaacaagaatgtgcaacgaagtatagtgcttgacagagataagcatttctttctttcatcattcatcctttccttcattccttcatgcgagcaataacttctattgctgcctcatgataacttaggagctaagaggatttaatatcaaccaagcacagacatgatgcctgccctggaggagcccacagttaagcaagaagccaaagcctaaacaatgctgcagatgtgacccagtcgttgtggtggtggtgccaaaacagacacacatgctattttgaaatcctacaataaataagatcctgggatgcttatgaaggaccatctcctgaggaagcaacacctgagcggagaccggaaggcaagtaggggttaattgctctaggaaaacaaagagctttgcaggccaggggacattcacataatggaacaatacacagcaataaaagggaatggctccttgctgccagcatggcagtgaaggacccctggcaccataataagagattacatgttgtgtgctaccctttccataaagttcgaaaacaaaaagaaacatatcatgttgataacataaagcaatacaaaataaagacaaaatcagatatctcagtggaagagtgggagagacaaaatggaagattcacagagcaaattgtaaattactggcgaaggggttgatggggagttctggaaacttcactgaattattttaaatgtatacctaaagaaggccaagcattggccaatcatgctttaatgcacagcaaaaattatgaataagaaaattctggaagtactattctgagtaatgggaacttaagggttatctagagagttgataaagagaagcagaaataggcaagatgggcaaccaggctgcaaatatggctggactctccatgtggaaacccacagtccttttcaagcagctttctttttatctcaagataaagaaacgctcttacgtgacagcttcaaaatttgcattttgaaaaaaaaatacagtcactctgctttaaacacagtgacagtctaaggagaggccaaaataaatgtggatggacattttggaagcctcgcctagacaaaagatggcgagagcttagaatcctgtggagggctttccttttgctctctccttttgccccctcctctcttacccttcactctccctctatctcccttcgtctctctcactgtctgcccgcccccataataaactccatggttaatgtatctcttggttcgtgttccgtggtgcacctctttaacttacacaaaagaacaacaattggtgctgtgaaccccgacaggctctgttctctctcccgtcacctgctggcagctgccagagacatcgggatcctgctctcgaacccacaactaacttttcatctacacattgatgcctcctggtaagacaccccttctccagtcagtacatttcccacagatagggtctagcaccgagtatgccgagcggtacattcattttggctttaagcctccggtggttactgtttaccatctttccggccactgagtcctttcgggccctgtcccttggccacagtctcgggctgatgagctccaggatcgatttgccattttcggcctcacccatgggaaatacgcgtcaaactggcagcttaacagctctttagatcgtaatgtgacctttccagttactgccagcagacagtaaaacgaaaggagttactacatttctaagctttcttcttacctctctgctgcgcttctacggtgcccttctcctttcagatgccagcggctcgcagtggcctggcctggggcagcgtctgctctggaggctctgagagttttttatttttcattttttcccccacaaatgaggcttgaggttttcgggttttgtactgactggtgcattcgtttctcagacctctggtggccttttttggatgttttgccacttggactctggtgtcctgttggtttcacacatctttctgcctcatagagaaaaaagccacttctgccagcagacaggaacgtgcttgtggcagcccccatcttggccgtgtggcctagtttgggaacgtgtttatggaagctgccatcttcaccacgtgaccgagctgtaggcatgcccactctatggttactcctttccctcagccaaggcagagggcagtctagccagcttctgccgacaaaccctgatgatagatacgattcatttaccttttgccttttatttttgtctctaatttcttctttcactggccctgttggcatggcttgtttatggaatcctgtgcttttccaggggcccgttctatccagagcggatctactttcttgtcactggcagtttcaagtctattgcgcgtctttaaatctcctgtctgtgtgctacaaccagattatactctggttctcccttttttcttttatccagtcctgtttgatatatctgcttgtctctgtacatgtgttttatatatatatatatatatatatatatatatatatatatatatatgctaactctgtgcaacttagattcaactatgctaagtctctatttctaaattgttatgtatctttaaatgatggtaaacatttaaagttataaaggtcaatttcaacttcctgtaagctgtttacaaaggtaaagcttctattacaaaagggaatttttctctacttctttgtcctgtagaggtgtaaatctaacctgctaagttaaaaccagttacagccaggctagaggactctaattaaaacatccctccacagcctctcagcttcaatccagttctccagacagatcctgcactaatctatagccatacaaattaattagagggataaaaccttacctagctacctatgtgcttaaaaaagtaactaaagacaaattttgtctgcctcaactgttgcaaaggactcttcagaccgtggacgagaggacagtagaatcgactttctccacattgcttgggccaatggtaggcaagtcttcctactattcctaatccacaggtcccatgctatcagcagaaggcaggtcaccttaaagccgctgccctcaacaactatggaggaccttgggggtggctgtacatgcagttagctaataagtctctgttactctttaatcattaattcaggtaaaattttatccttctcaagaactctgatgctttttgatggctggtagctttgccagcttaaagcaacagccaaagctccaactgtcacaaaaaagatttcaggaacagatattttagggtttatctatgtgaagacaggaaagagtaagttataaaggtctaagaatggaaggtctaagatggtaatgtaaggtgtatgaattaaagttatgaaggtctgaggataaaaaggcttaagtgatgacaaggtgagttgagacattcaaataatgaaacaagttatcagatctttctctctcattatgctactgttcaaagtcttaacattaatcaataaagttttaatgagcagggtattaaacaacatgctataccactatatgataactgcaacgtcaaaattaagatgcttttcattctcctaaagatacctgtcagctttaaaaatgttaatgctttctgccaagtggcttccaacattaatatgctgcaaatatgtctaatacttatgttttcacaaactcaaaggattcttgtaaattccagggagccaaattggacccacccaaacaggtcagattcacttcagatattattcaacctttccctggtcctgggattcccttccctcctatcaggactccctgggagcccctccctcaccttacaatcctcccctcaagtaccaggaccgaagaaaaaaaattttcctcaacttaactttgtactcttctctgccaacatcttgccaggtctacagaggtgccagagttccatacagcctggactatgaaggagcaaccagctaccccaggacatggcagcatcccagctttctcaggtcccccaaagatggtcaacgccccccacgtcagcaggaagcagtcttgagaactcgatgcccttgttccctaacttgccatgtccaactccccacctttttaataataataaaaggtgagattgttggaattcagcaccatgctgacccctgacaacgggcagggcacacacagtggtatggtcacatcattgctactccactcattatggggctgcttaaggattcagaacgcatgtgcaagtttccttttttaagcaagcacctccatgtgtttccctcttccttttgctctctccttttgccgcctcctttctcgccctttgctctcccccctctctctctcccttcatctctctctctctctctctctctctctctctctctctctctctctctcagccatgagctacctcctccctccctccctctttcttctctctctctctctctctctctctctctctctctctctctctctctctccccatccccctttttctctcccctcccccataataaactccatggttaatgtaaaaaaaaaaaataaaagaatcctgtatgatggtgatgatggaggagggcggttatggtgagctaaggataatgacggttctggtggtatcagcatagaagcaatgacagtgatgataatggagtagcgacagccatgacagatatggcctaggtggcaatggtggtattggtactgatgataacaatagattttagttgctgggtggtggtggcacacacctttaatctcagccctcaggaggcagaggcgggtggatctctgtgagttccaggacagccagggctacacagagaaaccctgctaaaacaaacaaacaacaacaaaaacaaaacaaagaaaaaaaaaggattttagtgttggaaacactaaaagtcagatttgaagatgtttagaaagtaaaaaatctatggattttagatgcatcattgatacgtgtgttgacagagagggacctgtcgatgataaattattgcttctggtttgccaaaaagtaggggtgtgtggagaaggggacagaacgtttagttgaaactatgctgagtttgagtggctctggtcccatctctctccaacttttctccaggaatgatccctactttctcctttgttgcctaaaagacacttcaaaaactcagattctttctggagcagggcaagtagccagggtgactggagcagactgggtcagggtgacattcagaatggaggccttcagagaatagatagggtacctcaaaagagaatggttcacataagcccattccaagggagggccaaagctgctaagtcttaatgattccagggggagagcacacacaccagccatgagctacctccttccctccctccctcctttcttctctctctctctctctctctctctctctctctctctctctctctctctgtctctgtctctatctttgtctgtcaaccatgagaccaatcttctacataaacagaacaagtcattggccctagggtagtcagattggaattttggttccagccgggcagtggtggcgcacgcctttaatcccagcacttgggaggcagaggcaggcggatctctgtgagttccagaccagcctggtctacaagagctagttccaagacagcctccaaagccacagagaaaccctgtctcgaaaaacaaacaaacaaaaaaagaattttggttctaaatcattacttaatgatgttttttaacccatcatatatgacttatcagagtaccactttttgaaacaaggaaaatgatttctggatcagaatgcaaattaattatacacccaataacaatattgtgttgactttcaaaatattttaaaaggattgtcattgaaattttataacaataaaatagcattaagctcaatgaactatagtgaacactattcacagatcctagcactgagattttaccaaagcatatagttagtttttaaacatcatctaaaaattttttttttatttttgagacacagtttctctgtgtaacaacagctctggttttcccggaattcactctgtagatcagggtggctccaaactcacagagacactcctgcctctacaggttgggattaaaggcgtgtgccattacctcccagctaagagaattttaaagatgtaaaaatcttccagaaaactgcaagaacagactaatgaagatgcccatacactccattcattcagattcatcgccactggctttcatccatggcagggttttctcaccacccctttaaagctacaaattccttggtcactagtgtctcagcatgcattcactatggacaatgactgcccttatgtaaccctaatgaagtgttccaacacaagaccaatacaatactgttatctagcagtatttccactctgattttattttattttttctgattcaggaccaggcagggccacccagtggcttgggcactgacatatatttaatttcctctaatttggagcagttactcctgtctctcaggataccaccatgtctgaagactacaagccaggagtctcacagaataccttcaacttggatgtgcttgactgtttcttcatgatcagaatgaggatgaaggaatgctacatatggtgtctgtgtcacctcaccccaggtggcacaaataccactttgattggctggttgtgtctgccagattccccatcctacaggaaatttcccctttgcaatctgcaattaatctgtaggaggaggatgtgagacgctcacctgctcaccaacatatatttaaccaataattccagtatccattgaagatttattcctttgtttatatctgtgtggctgccaatgttttgtaggttataactgtgattttgactctaacacttctcatcactggaatcattattgccatggaaggtgtatatttgcaggttataaaaaaggaattctacatttatccaggtgtccctgtaagagagagtgttttctcccccccccatttatttatttttatatctgtgtggatacctggactcactgtgatctccatgctagcatgtctataataggccagtggaagcagattctagctagctaagtgtctttgacttcatttggaaactaaactctgggcaccagcgtgctcatagctacttcattagttgcttcctatgttggcaccatggaatacttgacaaagcaacttaaggaaacaagggttatttccagctcacagtttgaagtgaagtgcagagggagcatggctacaagcaagaagcaaagagccacaaatgttcacattcggttagctctctcctttttatgccgtccaaaaccccagcccatgaaatagtcctgcccacacttagggcaaatctgttcacctcagctaacttaatctagaaaaatcctctcacagacatgcccagagatttgtatcaaaggcaattccatgtcctgtcaaggagataatataaaccgccatggctactgcatgttactcacactagctggtttcagtgaaaaaacacgtaagttcagagtggttcttgacagttcagtcgagtaccagggcactcttctctgccctctcccaccccgtcaaaatcccctgggatggttcatctgtccaacttgaagggacttaggatcaacagaaaaacacacctctgggtgtgtctaggagtgtgtttctagaaaggtttaacttaggagagaaaccccatattgcatgtgggccacaccatcccatgggctggggtcaagggctggctttgaaagataaatgagtttagcaattgcattcatctctctctgcttcctgactgtagatgaaatgtgaccaggcacctcacattcctattgccattccattcccacgacaatggacttgtacttctaaactgtgagccaaattgaacccttctgctttgagctcatgctcgaaaagcatttggttacagtgagtgtaatacagccccttctcccacagcacacacacaggctgtaccctaggatgctaagcctgattctcacggagagcatgaatgttaaagcaccagtgctctcctccatttcttcccccacttcctagtggctgagataatttattgtgttgtaccctagtttctaaagggtttctacttaagtttctcacattctagacatgctccggttttcctaggcacgactctgcaaagatttcatcgtgtagaggtactatattaatattatttatcatcagccatacaggggacaattcccttgctgtaaataaggttgacaggggacttgataataacttccatctgtttggcaacttagagtttacatagtactttacacggaacgcgtattgcttcagtacctcctaaaggtttgcatttttttttaggctccagacagaatgaacaatagataagctcagggctgcacggatgtttcacgtagtaggaacactaactgctaagcttttcaaagacacacttagcatctatgatggatggagatagatagaaaagaaaagcatgagtgatcctaagcagcaggtgatctaaactgtggtaataattctagcattttatttttgccagtggtatatcagagacattttgtgtgttctgtagatctcaatttttaaaaagacattgcttccccaaaacattctgaatggcaaatgctttggaagcagtaatgctttaatatgcctgcatgcaggatctcttgggagagatgggagcaggactgaatccaagagcatttacaccagactatgtaggccagtggctctcaacctttctaaagctgccatcctttagtacagtccctcatgtcctggtgaccccaaccataatattattttagttgctgcttcataactgtaattttgctaatgttatgaatggtaatgtaaatatctcatatgcagatgatcttaggtgacccctgtgaaaagattattctaactgcaaaggggtcatgacccacgggttgagaaccacagctgtagggtaaacttctaagctttaaggtcacatccaccaagcagtcactgctggatgagaaaagtcctaaagccaggtgagggtagcttgcccacaggctaaacatggaggggggagcttgattcgatggcacctcattggaggtgcaccaacttaaaatacaaaactatgttttgaacttccagctactgagaagcatcgaatacatgttttagttttgtttttttgttttgtttttgtttttgttttaagccaatacaatgtcaaagaccatcacattctctttgtttcacagtttcataagatttttggacttcaatgtttccagaatcacattgtattataaattaaggtgtgcttgtcttaaactgtgcctacagcatggtctttaaactcagtgcacattagaactaggcagaactcttattacagaagtggaatgttgagtgggcagtaaggaacctaccttgtaagcacgaggacctgagcctgttcccggaacccacaaaacactgctgggaaaagtgcctgcccagactgctatacccagcaaaacattcaatcacagtagatggagaaaataagacattgcataataaaaccacatttaagcagtgattatctactaatccacccccccccaaagaactacaaggaaaacgccaacctaaacctaaagagactaaccacatccaagaaaatacaaggaataagtgatccaagaccagcagattaaaagagaggaagcagagacacagacacaaacaggcacaggcacaacacacacacacacacacacacacacacacacacacacacaccacaacaacaaaataacaggagtcaatacacagtgtttattgatatctcttaacatgatctccatttcccaataaaaagttacagactaacaaagtggatgtgaaaacagtatccatccttctgttgcatccaagaaacatgctttaacatcaaggacagacatcacttcaaggtgaaagaacagaaaaaatattttaagcaaaggcctaagaactaagctggtgtagtgattttaatatctgacagacttcaaatcaaaactaatcagaagagataggaagggaaactacatactaatcaaaggaaaaatccaccaagaggatattacatttcttagtatttatgaaccaaacgaaaggacacccaagtttaaatcacatattgatcctcacactgatagtgggagactccagtaccctactcttgctggtagacaggtcatccagataaaaactaaacagagaaatgctggagctgatgttataaagcaaacagacataacagatatttgcagagcatttcactgaaacataaaagaatataccctttctttttagctcatagaactttctccaaaattgaccacatacttgggcacaaatgaagtctcaatagataaaaaagattataaactcatggaaactaaacaactcattacatgaaaaatgggtcaagaaagaaattaaaactttctacaatcggataaaaatgaatacacaacatacccagacttatgggacacaatgaaggagattttttttttaactttttaaaatttaaattagaaacaagctttttttacatgtcaatcccacttccctctccctcccctcctcccctgctcccctgccccccactagcctcctatcccatcccctttctgctccccagagagggtgaagccttccatggggggatcttcaaagtctgccataccatttggagcagggcctaggccctcccccatgtgtctagtctgagagagtatccctctatgtggaattggctcccaaactgcatttcgtatactagggataaatactgatatactaccagaggccccatggattgccaaggcctcctcactgacactcatattcagggggtctggatcaatcccatgctggtttcccagctatcggtctggggctcccatttgttcaggtcagctgtttctgtgggtttctccagtcttgtcttgacccctttgctcatcactcctccctctctgtaactggattccaggagttcagttcagtgtttagttgtgggtgtctgcttctttttccatcagctactggatgaaggctctaggatggcatataaagtagtcatcaatctcattatcggggaagggcatttaaggtagcctgtcacccactgcttatatggttagttggcatcatccttgtagatctctggacacttccctagtgcctgatttctctttaaacatataatgtctccctctattatggtatctcttagcttgctctcctctattcttcccccaactcaacctcctgctccctcatgtcctcctctcccccacccttctccccttctctttctcctagctccatctcccctccccccatgcttccaattagcttaggagatcttgttcctttccccttctccaaggcaccatgtatgtctctcttagggtcctccttgtttcctaacttctctggcagtgtggattgtaggctggtaatcctttgtctatgtttaaaatccatgtatgagtgagtacataccatgtttgtcttttttgtgactggattacctcatcaggatggtttcttctagttccatctatttgtctgcaaatttcaagattccattggtttgttgctgttttttttttcccccactgaatagtattccattgtgtaaatgcaccacattttctctatccattcttcagttgagggtcatctaggttgcttccaggttctgactattacaaataatgctgctatgaacatagttgaaaagatgtccttgttgtatgaatgtgcatcttttgggtgtatgcctaagagtggaattgctggatcttgtggtagactgattcccattttcctgagaaatctccatactgatttccaaagtgtctgtatgagttggcactcccagcagcaatggaggagtgttcctctttttccacatcctctccagcataaactttcattggtgtttttgattttagccattctgacagaagtaagatgctatctcagggttgttttgatttgcatttccctgatggctaaggatgttgagcactttcttatgtgtctttcagccattttagactcctctattgagaactgtctatttagttctgaaccccactttttaattggattatttggtgttttggagaccagcttcttgagttctttgcaaattttggagatcagccctctgtcagatgtggggttggtgaatatcttttcccattctgtgggctgccattttgtcttgttgactgtgtcttttgccttacagaagcttctcagtttcaggaggtcccatttattaattgtcaatctcagtgtctgtgctactggtgttatgttcaggaagaggtctcctgtaccaattcattcaagggtacttcccactctctcttctaagaggttcagtgtggctggatttatgttgaggtctttgatctatttggacttaagttttgtgcatggcgatagacatggatctatctgcagtcttccacatgccagcatccagttatgccagcaccatttgttgaagatgctttctcttttccaatgtataattttagcttctttgtcaaaaattaggtgttcataggtgtgcaggctaatatcagggttttcaactctattccattggtctacctgtctatttttgtgccaataccaagctgttttcaggactatagctctataatagagcttgaaatcagggatggtgatgcttccggaagttcctttattatacaggattgttttggctatcctgggtcttttgttttccatataaagttgagtattgttctttcaaggtctggagattttggcaagattgccatttttaccatgttgattctacctatccaagagcatgggagatgctttccattttctggtatcttctttaatttctttctttaaagactcaaagttcagctgggcggtgttggtgcacgcctttaatcccagcactcaggaggcagaggcaggcggatctctttgagttcgaggccagtctggtctccagagggagtgccaggataggttccaaagctacacagagaaaccctgtcttgaaaaaacaaaaagaaaaaaaaaagttggagtggtctcaaactcgtaacttaacatcacacttgaaagttctagaacaaaaaggaaaaagaaaaacatccaacaggattagatagcaagaaaaagtcaaatgcatggctgagataaataaaatagaaacagcaacaacaatacaaagaatcaatgaaacaaagagttggttctttgggaaaatcagtaagattgataaacacttattcaaattaactaaaaggcaaagaaagcatactcaaatttacaaaattataaatgaaaaagagcacataacaacagttactgaggaaattcagagaatcacaaagacatatttaaaaaaaaaaaaaaaaagctcttcaccacattggaaaatctaaaataaatggacgattttctctttatacaccatttaccaaagttaagtcaagatcaaattagcaatttaaatagacctataaccccattgaaataaagctactccttaaaagtctcccaaccaaagaaagagcaggaccagatggttttagtgagagagtctaccagacaatcaagagttaatgccaatacttctcaattattccacaaaatagaaacagaagggtcattgcccaactcattttacaaggccacaactccccctgagacccaaaccacataaaaacccaacaaagaaagagaatcacagactaatttcccttaggaatcagatgcaaaaattctcaataaaatacttgcaaactgaatctaagaacacatcaaaaagatcatcctccatgatcaagtaggcttcatcccagatgaatggatggctcaacatacataaatcaataaacgtaatccacaatataaacaaattgaaagacaaaaaccacattatcatctcattagatgcagaaaaggaccaggacagaatccaacaccccttcctgataaaagttctggagacattattgatacatgggacattcctcaacataataaaagcaatttaccacaagaccatagctaatatcaacttaaatggagaaaaactcaaagtagttccactaaaatcaggaacaagacaaggttagttgtccactctctccacacatattcaatatagtactcaaagtcttagcttgaacaataagacaaccgaaggagatgaaggggatgcaaattggaaaaaaataagtcaaaatatcttcacagatgctacagtagtatacataagtgactctaaaaattccaccaggaaatgcctagagctgataaacactttcagtaaagtagttggatacaaaattaacttacaaaaatcagtagccctcctatattcaaatgatagactgagaaataaatcatggaaaacactttttccaatagcctcaaataatataaagtttcttggggtaactaaccaagcaagtaaaaggcttgtatgataaaaactttaagacactgaagaaagaaactgaagaagatagcagaatatggacagatcatggaaatgtaggcttagcagaaaaaatagccatcttaccaaaagcaacctacataacctaccaaaatacaatccccatcataattccagcacaattctttatagatcttgagaggacaattttcagcttcatatggaaacacaaaagacccaggatagcttaaacaccttaacaataaaagaactgctagagtatcatcctccccaatttcaagttgtactactgagctatagtaataaaaaacagtatggtattggcacaaaaacagatatgttgatccatgcaatctaattggaagacccagacataaatcctcacacctaggggtgcctcatttttttcataaagagaccataaatatacactggaagaaaaagacagcatctttaacaaatggtactggtcaagttgtcgaagaaatccaaatagatacattgtagatgcatacagaaggatccaaataaatgtctacttatcaccctccacacaactcaactccaaatggatcaaagaactcaacataaaaccagaaacagataacactaaacccaatagatgagaaaatggagaacagcctagaactgggagagttcttgggataggagaagagttcctaaacagaacaccaaattgtaggcactaagattagcaattaataaatgggaccttatgaaactgaaaagctctgtaaagcaaaggacaccatcatttggacaaagtggcagcctacagaatgggaaaagattattattttttaaccacctacacatcggagggctaatatccaaattatataaagaactcaaaaaattagatatcaagaaaacaaataggagcttgagagatggctcagtggttatgagcactgactgatcttccagaggaagtgggttcaattcccagcacccacatggcagctcacacatgtctgtaactccagttgcatggaatctgagaccctcacaagacatatatgcaggcaaagtaccaatgcacataaaataaaaatagcactgaaaaaagaaaacaacccaattaaaaatgtggtttggttctaaatagacaattctcaaaagagaaaactcaaatggctgagaaacagttaaagaaatgttcaacatccttagccatcaggatgcctttttgcattggggaaatgcaaaaaagaaaaaaactactttgagatttcatatcacacctatcagaataactaagatcaataggacaagtgacagtttatgctggcatggctgtagagtaagaggaactcccctccattgctggtgggagtgcaaacaagtacagccactatagaaaccagtgtggcagttactaaggaagatgggaatcaatttacctcaagatctagctatactactcttgagcatataccaaaaggatgcttcaccctaccataaagacacttgctcaaccatcttcattgctgctctattcataatagccagaaattggaaacaacctggatgctgctcaagagagaaatggataaagaaaatgtggtacattaacacaacggaggatttctcagccattgaaatcctgaaatttgctggtaaatggatggaaccagaaaaaaaaatcatcctgagtgaggtaacccagattcagaaagataaatatggtacatatattgtatttgcttatatgtggatattagctgtgaaatcaatgataaccaagctacaatccatagtaccacagagattagttagttatagagcaaatgaatgggtgggggttgacagatagatctccctaggaaagggaaatagaatagatagttatggatgggtggaggtgaagggctggaatagacagatcaagtagggaggagaaagggagagaaggaaaagggacagaacatgggaaagaaatttaaaattaaggaccattttccggggtagtatggaaatctgatgtagtagaagcttcctaaaacatatacatatgtgaaggtgatctaaatgaaatcagcaaacaatgggggagacagagctccaactggccatattttgtcagcaaatgaagcttctagtaccagattgggttacatctaattgagttgttggccaaagggatgccctgggaatctccaaacaacccaaccattgtcaagactataggttgctccccacaaactggcagcaaggccccattgctaaagacacacaattctttgaacatggagaagttgagctggtgcctacagagagccttcacacctatatgctagtgtctttggtataggaaggtactctgcccactactaaaggagacatgtaagcaccaacccagtacaaactcttcatctacaatggtgtcctagctgcaagatatgacagtgcaatggtggcacaaagcttgtataacaaccagtatctgatttgatttaaggcctgctccatgagctggaacctatacctgacaggagcccatacttgaccctgcttgggtgaccaagagcgagagactagattgtccagcgacctagggtaaaaccaaacactacactgctcaaacaacagcagcaacaacaacaaaatcttaacagtaaagtgactcctaatgacactgttctgtactcatagatcagttcagcaattatcagagaaagcttcctcctgcagaatgtgggaacaaatacagggacccacagccggacatgcagagaacaagaggccatggaacactcagccctgaatggagtatctccttcaaatccttcctcttcaaggttcagggaaccctgcagaagaggagacagagagtgtaagagccagagtagatggaggacaccaagaacacaaggtcctttaaattaacacaattgatgcacagactgaggcagcatgcacagggcctgcacaagtctgtaccagatgtggtcctgcagctgaaaggagaagtagacacatgtccccatccctaacccagaagctgtctctaattgataactgcttgaaatgaaaatttagttcaagggaacctcaccagagaaacaaactactcttaagggtaggctgcatggccagccgtagatgggtaacagaaaatgaactcaatgtcatctttggaggctcctggtctcatagcatcatatcagggctcttccttttttcctttagattttatcttaccttattgtaatttaatttatatacacatatgtttttgtttttttaagaatttatttatttattgtatatacaactttctgcttccatatatatctgcacaccagaagagggcaccagatctcataacggatggttgtgagccaccatgtggttgctgggaattgaactcaggacctctggaagagcagtcagtgctcttaacctctgagccatctctccaacccccacacatatgttttttgtctctctttttctctacaggttttttgtgtatatattgtggcttcctatttagtgtttttatgggattcctgagtgtatagacatgtgggtctctggttcttgtgtttctcttgggctcttttccttctgcctgtttgttttatccaattttgatggggtggtttttgttttgtcttattatatttcattttattattgtcccttagaaaactgtttgttttccattgaaagaaaggaggtggattggaattggaggggagatggggagaaactgagaggaatagagggagaagaaactgtaatcaggacatatatgcaagacaaaaatctacttcaataaaagggaaagaaagaacctggcatggtggcaaaatacctttaatcctgtgagttcgaggtcagcatggtctataatgcaagttccaggacagtcagcattacacagagaaatcgtgtctcaaaaaaccaagagggaaaaaagaggaaaacaaagaaaaggaaaaaaagaaataatctacctcatggagataaaaatataagtgaaaatgctattgaattatcacactaattcatattatgaaatccgttgtaaccctgagggctggggatgtctctcagttggcagactgcttagcatgcagcatgcacacaggtgatgctcttagcatgcagctctggatttgttccctggaccacataactcaagtgtgttggtaaacttcctaatcccagaatgcagatggaggcaggatggccaaaagcttaaagtgatcatgggaaacacagaaattatgaggccatcttaggctgggttggggcatatataaacaaaattaaataaataaaaacttttttttttaagtgagacaagtttcacaatcttaaaggagaacgtgtgaaggggttaaacgagttgaattgtcttgggtagccagatgggttctaattcaattgttctttagcaactagatgtgacccagacaagtggagggaaagccattttggtgggaggggcagcagtgtgagttgtggcagtggtttgctgtatgcctcagcaggggatggtgtgaactgctaggagaaaaccttccactgtagtcatcactgcagatgagaagggggtttctttcaaaaaattaaaataagctgagacctattctggttctcacccaaattttagtgtggctggattcctcaaacatcctctcccacctgaagctatgtccaggtgcctgaggctgggtccaggctaatgctggcgaaagggtgtcccctgctggccgtccaaagccacatgtttttctaccagaaaatttggttaggctaggagcaggtgactaagaaaagctgggtctgtgatggagggacaatgtcggtgtgtttcactgagaagctcataaaggcatggtaacacaaagtgaagtgttcctcttctaggacgatctctcttgagaaacccttttttcctggagggaaaatacaaatgatcaagctgatatttgactgaaagatggagtcatgacacagttatgctgttaagggacagggggtgaaatttaggcatgcatttcattgcattccattttggaaggacctgaatctgttgaaaagttctttaaaaacagaggcatattccacttaataaaattaaatttcattttctgacatattagtaaggagacttttatcatacgtatatgtatatatatatatatacatgtgtgtgtatatatatacatatatatgaatgtatatatatatatatatatatatatatatttcatatatatggaagagcatgcacattcagtagagcttttgaatgctaactgaggtaccatgaggagctattaagatgctactagctactagtgagctgggcgatggtggcgcacgcctttaatcccggcacttgggaggcagaggcaggcggatctctgtgatttcgagaccagcctggtctacagagcaagttccaagacagcctccaaagccacagggaaaccctgtctcgaaaaaccaaaaaaaaaaaaaaaaaaaaaaaaaaaaaaaaaaaaaaaaaaaaaaaaagatgctactagtgaaggacaagaacagtggagtctccaggaccctggaagtctcctggcaaatttttcagttccaaggtcaactgtcatttgtcctcagtgcgtttgaaatgtgtattagatgaatgggcttggtttgggacaccagacagtggatctgggcacaagattttaggtgtggcatggggttacttcctaaagaaattgagatgtagaatgtctctccccctctctgctcctctcttctccctctaggtggagttgcgcttaaaagatacacacattcactgagtcggtgctcttgagaatggaagagccaaagcatgtggagggagaagaaagaaactttcctccactggcctcttggtaaacctgtcttgggggccattttcactctcagcagcacttaatccccggggaattccagctttctgaatcctggcaaacacatccctattaggcataatcctacaccaagaaatcacagtgaattcttaggtatattttaggattatctatagtggagcgagaggaagtgaatgtagttgaacacaaagaaatcctattaacagcagctgctgcccgggtactgggtgtggggtgtcttccacaatcgtctccccagaccccttcaaagttggagtagcatatactcatgaactccagagccagtgagagctgagctccacaccccatgcccagctcaggccagtgctcatccctgtgatatctggggtctctactgatgattgcagaagctggtagtgtaattaccttggaactattgaatatacaaagcaccacagcttccctttttttcttatatcctgggtgtagttgacagggaaccctcccttccctcctcccctactctacttccttcatttattttttttttctgatacagggtttctgtgtggctttggaggctgtcctgaaactagctcttgtagactaggctgttcttgaactcacagagatctgcctgcctctgcttcgagtgctgggattaaaggcatgaaccaccgccacccggcttccttccttcttttttaaaccaaagacactgtttcagcaaaattctagactaccttagggtctgaggatgtagctcagtgatagactatttgaccagcatgtgaaaaaccccatgttccatccccagaaacataagaaacgtttttctaatcctagactaccttaataggaaggcctatttagctactgactcaaagtcctgtgcgtctgtgcatgtcacgtacatgtacctggtttgcatagagtaaagagggtggacaaagattagggacactgaggaagcagtgagtggcagggagctgcacagtgccagggagtggagcctggtgtaaacagcatggggacagcaatctgatgttatgacttgaattctggttctgccattaacaaccaaaagaatagctaacatctgagtgctgacgtgtgtcaagtacattccaggcatgtcaccagtgtgaactcacctaatcctcatgactatccataagtacttattattaccatctcactgataagaaaatttgagacatacaaaggttaagctagtgtcccgggtcatgtgagctgatagagaggagagttggcttgaattcagacagtctagcaatattaaccattatggaatctctcgtctctggcagatttactaattgtgttagtttaccttcctaggctttaacctttcctatatacaaattcatgagttttttttttttttttttggttgttgttgttaatcaactattgaggtcagagctagaggcagggagactagtgaactggccagagaaattgtctggatgggagaactgaagacttcaagttatctgacaggccgaggggaaatgcctgagtaaagggacttgagacatcaggaaaacaggaaaccagggacaagcctgtgtgtgacctcataggtcagaggtagcaagatcatgcacgcagtcactcagcaaaatgccaaggtgagagaatgggtgcatggggagatccctacagaaagctgaaggaggaaatggctttggaaccaccatgagcaaggaggccagctctgaaaggggatgctgccagacgggaagatcatggttcaaggttgagggtcacagacaataagtagcatgtacgtcagtacacggagggagagactggagcagggagctggtgaactggccagagaataggtctggataagaaaggtgagtacatcaagttggctgacagagagaggcgaaaagtttgagccaagagactagggacttaaggcatcaagatactggaagctgatggaatgagagtagaggaaagttgtagtgagcacacggatgagtgaggggacagtcaaggaaggtgcctactgaggcttctttcagactatatcattcctgaggcctgtgaagcagggcacacagggccagaatgatgaattgtgtagttcagctttgagaaaaagccaagggaaaacacaacagtgacagcagccttctaggtgccaacctgtccccctcccctaccatcccctccagtcaacaaagagtaccttggtacagatatgtggctttcactggaaagaggcaacacaaatagcgctaacagagaagagggaataagcagacagatccctgttgtgtacgttgggcaagcatttcagtctttctgctttctgtatctcagtgtgtgcaggtataaaatggggacaataatccctgccatgaggagcatctgagtgaacacctactaagtgcctctcctgagcaagtgtgtagacaatccccccaccccctccccatctcactgccgtttggccccaaataaatagagagttatattaattataaactgtttggccgatggctcaggctttatattggctagttttctcttaattatgaactcatttctattaaactaagtatttccatgttgtctcatcttatcagagaatgtccggtgcatcctatcttcctagtagctacatggtgtctcccccgtggctcactctctgcatcctcttcccagaattcaccttttctggtagccctgattatacttcctccctggctactggccaatcagtgttttattcatcagccaataagagaaacatatatacagcaggacatcccccatcacaagtgcacaggacaagatagctggtcctgttgggtggtagtagacccaagacagacatgagacatctgtctgagggctcacagcctggattcaaactcgcatcagccacctttacttccatgttccatactagggtgaggatgagactagaaaaaggtataagagaaaagccaaggaaattatgggaatagcaattaagggaggacaggaggtagaaggagaaattgagggaaaaacagaataaagattgtgtgctggttagttttttgtcagcttgacacaagccagggttatcagaagagggaatatcagttgagaaaacgcctccatcagattggcttgtgggtgatgggggaagtccttctgtatatatgtttgtcttattggttgataaataaagcaccattggccaatatgaaagcaagataagtggggctaggagttgaggaggattctgggaaatgtagtaatgacaggagttgccatgtgagccctgcgaagacatggcacataaggcaggtgtcctcaataagtctttatatggttatggttgataattaagactaagctagcaaatagaaatcctagtcattggccagcagcattgtgtgttattttgggggccctagaatggtggtggaactcaggcagcatgaccagaaaaaggtaaagatttacagtaaacacagattcagatgaggaaaaccctctaagggtttacagtgtgtttgaaaatatacctaggcttgtgagagaaaaaggaacaggataaagtgtttaaaaaagaagaagaaatagagtggatgggtgtggtggcacacacctttaatctcagcactcgggaggcagaggcaagcagatctctttgacttcaaggccagcctggtgtacaaagtgagttcaagggcagccaaggttacacagagaaaccctgtctcataaaaggaaaaaatagaagtaaaagaaataagtaataagtaagccacgtaaagatggaaaatacacagagagtctggatactctatgctatatcgtctttaaagtgtttgattgccgaggaaagagctacagctgctaaaatacatttgattataggtgctgttagattaatccaacttgcatattttaaaaatgatttgacttctaaatttaaatataaggacagattccttgggaaaggagttttttgcttgtgtttccacagaaaatggaaagctatggattccttccagactaatatggtttgatgaagcaagaccccctgaaacagtgtcccagatgatccagcatctgaaacagctgagaagatgcagccttgcagactacaaaaacaaggacctggccaggtttctgagtttaatcatgatccccatggcatggacatcggccccaaccagcaggaagcagtttggaatgaacgatgcccaaattcccaaatattgtttataaatgtttgttttcacttaaatggggttggttataaatgttaatgatcatagtcaatctctttttaaaggaaaaaaggggaacaggatatggaaatgaatactttacatttctatggattttcatttattgatacaaatttaaggttaattttgttatatgtatatttctcctcttgtttggtattgtgtttatatagatctcttaaagtgtaatgcataattaaatacagattgtatatagtcaggtataaaagtcaaaacttacagttagattatttaggttttctagatatacagagatgtatttgagatagatagttattcttcaaaccttacaaagacctacagaatatatggtatttaaatggtttagggtttttcttgacagtgagacacaactgctcctgacacaccaattatgtcagaaaggaggatgggcatcaaagaaactcaatttggagtttgccttcaacattgcaagattagccatttgggcaagaaactcttgcctggattgtttgataaactggacatgcaggacccacagcaaagtgactgctgaacttgcaaaataagacagtcctaaagggttcctgcttcatggagaagtctgccacactgtggtctataggctgaagatggctgccccaacattacagaggaactttgggtgactgtccagttagtgagatgtctctgtcagctctagagtttatatagtatctttctgtggtctttgatggagttgaagacagatagttacggttatagttttctttagttattataaaagataagctacatgtaagaatttagactcacaaagataggatagatgatagaatattttctttaaatcttgctaaatgttatggactaaatattgtaactatacttcttctttgataactgttttgttatatattttactatgttaatgttaaaacccttcttttcatttagacagaaaagagatgatgggggaagtccttctgtgtgtatgtttgtcttatttgttgataaataaagcactgttggccaataggaaagcaagataggtggggctaggagctgaagaggattctgggaaatgtagtaaagacaggagttgccatgtgatccccaggaagacacgacaaataaggtcgatgtcctcgataagtctttataaaatacatagattactggttatggttgataattaaaactgagctagcaaatagaaatcctagtcattggccagcagcattgtaattaatataagaccctgtgtgtccaaaaagcatccaaatggccagaaaagagaatcaagaagtcacttgtttcatatggtcttcatagcacttatgtgaaagaattattaaattcatgggcaaccttcaatagggtgacacccacagattggaaatacctagtatcagctatgcttgaaattttgtctcagatacatcgaaaagctctgtggagggtggaagaaagccctcgatgtttcaaggcataaagaaatcttatcccctagataagattcttggtgagggtttttatgctgacccacaggttcaggccgaatatgatgagcatatattgtccttatgcaggacatcagccttaaatgcctggaataagagtcatgaaccaggagaaagagtagaaatctatttgaagaaagaacagggactgacagaacagtttcatgactttttacaaagactatccagggcaatagagttataggtagcagatccagaacctagaaatgacctctaagacaggtgaatgtacagttttcagtgattggaattctacctagagtttgccagagtgttaactaggttgtctgcattggaccagaaggacttcccccttcatgtgggcaggtctatgggagtattttcttgattaatgattgatgtgggagggcccagtctactgtggacaagtgctacccttgggaaggtggcttgtgtaaaaacggtaagttgagcaagccattgtctgtgagacagtactccttcatggtctgtgcttcagtttttccttcatgttcctgacttgagaacctgccctgacttacccccagtgatagactgtggttgctaatgatggtatgtataagccaaacaaatctttccctccttttggtcataggatttatcaaagcaatagaaagcaaactaagagggaaaattgaaaattgttcctgttcaaataagtcataggactaaaaattatcatagcaccaatttgccacctacccatttcccatgctatcagatacctgctactatgagaccttagaaacaaaaccctaggacatgatagaaccatagaaggggtgtgtgtgtgtagggggatttgagggcaggtaattgaaaaagctgatgcaagaggtttctgtgttaggaagcagccgggagaagcaggcttgatgttctatgtacactggttaagagagaatctggttggaaaaggagaggtagtgggcacagacagttctgaaacaggaacttgggtagacagttttggggacaggaaaacgttttttcttgtgtaatgaacccatttgggaatctggtgaagtttatagtccacttctcagaggttttaatgtctaaaaataaaatgaagtcccataaggctgttcatggactcttgacaaggttggagaaaggctggcagcaggcatgctgccagagattcaagaggtagctggggtacatgcagtccataattaagttccaaagatccctttaccgcccatccaataggaagctgggtgcatgtccctaagagatctactagggcattacagaagagtgcatcaaataatcccatttactgttcaattatgagtttatacttttccaggccatgctaagtgtgtccataagtgcatccttctgccccactgtctataagtagatgtgcgattatcataccaaccctgtctattgttggcggtcctattttgggctagccctatgtaatgtgaaatgaagagaagacgtgtgcagcaaaatcccgatatggaaatccagacttgaaaacattctccgatggcttggcatcctagggataaattggtcatagttttcaacaactcagatcaaagccaaatgctgcttgcattcagacagtgattcagggaccatgtcttatttggtttctttgaaaataaagaagacatttttttcatacctacgagagaaagcttttggctgccaaatttgtgcattgtacattttattgtactctaatacaaaattttacatcttgtctcaagtgtctcctcagaattaccctaacatttctaagctgaggtgcctgttaacaatgatggtctcctgatgtaacatgaagaagaagaagaaaaaaaaataggccaactggtaaagataaaaaataaatgagagtaaataaaacacatatggaatttctactttcagagttgaaatgtatacgagtttgtatgcaaatcagccatccaaataggaaagtaggctgggccagacttaggcacaattaagaaatggtgaagtttgctttctatggtttttgctcctggcctgggcattttatatgacccttgaccctcatttttagcctactttcctacctctgtcacccctgtgagaatgttcttcttctagggcctaactcggactcctttctgcactgcccagtgagtcttcaaaacacatgtgttttgtgtccctttgctgcaggccttgctcatagtgagaaataattaaatggataggttaaaaacaattagtctcacacagtcaattcttgactttaccaaacagattgtgtgtgtgtgtgtgtgtgtgtgtgtgtgtgtgtgtgtgtgtgtgatgaactggactatttcctggttgttctttgttctctttacctccagtgagtgccccagacacagaaccatagcttcggtggagaatgacaagaatgcatactagaaagtaggtgggcacctacacaaagggccacatagcaccaggttgaatgaaaacgatagctgtgttgattttattagatcaattgaatgcttttgttgtgtgttttgtgtggaagatgcatctctaagcaatcaacaataatgaactaatttcatcttcaaagcagtgctctagcataaagactggtacaactctttctttgtggccttaaggactggtgctcctggaaagcaaagagtttcctcacagtcaacatccagctattaaatgtggaggcaggaccgaaccccaactgtttggctccagagttttcattctcattttgtggtgtgtgtgtgtgtgtgtgtgtgtgtgtgtgtgtgtgtaccttgtatgtacacgtgaacacttgtggaggccagcaatcagctttaagtccctaactgaatgaacctgagttaggagagacctcatatctgtacctgtgaccacgcccagttatgtagaaggcatgtggaataaagggctgagagagaggcacaagcccctttggttcctgttgggtcacagagagcagctgagcttgatcctcagagctggaacttggggttatcagtttcttgagtaagtgacctctccccgaattaaattaacctatattatactagtcccacataccttaatctgttcatccacaaacctggagcttgtcatcttggctaggctggctaactagtgagactttagattctgcctgtttctgttaccccagcactggggttgcacacacatgttatcatgctaagattttatgaggttctatgcatctgaacctaggtcctcttgcttgcagagccagtgcattgcccactgagctatctcccagcctctgggtagtggtggtaggtttttttgtttgtttttttgagacggggtttctctgtagctttggagactgtcctggaactcactcagtagaccaggtaggccttgaactcacagtgatccacctgtctctgcctccagagtgctgggattaaagatatgtgccaccactgcccagttaattatttttactattttgtgttagtgttttgcctgcatgtatgtctgcgtgggggtgtcagatcttggagttacagacagttgtgagttgcaatgtggttgctggcaattgaacccaggacttctgcaagagcagtcagtgctcttaaccactgagtcatctctctagcgcccccccccccgtggtggttctttgtaaggtttgtttattttatgtgtatgtgtgtgcctgagtgtatgtatgtgcatcctgtgtatgccgtgaccacagaggccagaaagacggcatcagacccctggaactggagttagggcagttatgagctgccatgtggtgctgggaacaagtgttcttaactgctgagcctttggcacttaatggagcttgtccattcaccaagtgagtgaagcagagcagggtccttgatgtcaagccatttcatggtgatctgaaaagaagtcctaaagggactcttgaccgtggtttcttcaccatgggtgcccattagagttacctggaaaccttctaagcagttctgatacccaggtcccatgtgcactgatcgaatcacaagctccctggagcccaaccaattacacaacaaagcttccccgaatgtccaaaggcagctatccccaagaataatctctgcagaggattgggtacttaaagtagggactaacccagggaggaggggtgggcagggttctgaaagtctaaggttggagcccacacactgggagtacagatgattggtctcctggtgaacaaaaacccgaaggtaagatcatctctccagggtttagagaaagtgctaactgtgaccagtggaccccactcttataactccatctgatgctaattatatgtcaaagacacccatcttacattgctgagaacacgacaataaaatttcaacatgagtttcagagagaacaaatgttccaaccctcgaaggaggttttaaggaggcgcaagttggtgtcacctggggtgtcctgtaagccatgtatacatgttcttaaattgtacacgtaatttatgttaccacatgttttatcagcatcttatactagtggagtacaatgctcctggaaaaagcatgtgaactttgccagaggggctgggttcaaatctcctgttactttgtagctccgtgtctgtgaaaattgaatgagaccatggatctttttcttttttttagaggcactcatatttacatatccatgcccccattccctcgccctcccatcctttcatgttccccaccgaccgccccaacccacgcccctaccccctccccaggtatagtgaggccctccacagaggaccatcaaagtccatcgtatcttttgggggagggtctaggccctccttgctgtatctgggctacaatagtatccctccatagggaatgggctcccaaagtccatttgtgctctatggataaacactggctccactgttagaggtcccatagactgtcttggcctcctagctggcactcacattcagcgggcttggttaggtccaatgctggttccccagctatatgactagggtctccgtgctctcactaggtcaggccagctgtttctgtgggtttctgcagcactgtcttggctactttgctcatccctcctccctctctgcaactggattccaggagtatggttcagtgcttagttgtgggtgcctgtttctgcttccatcagctactagatgaaggctccaggaatggtaaccaaggtaaacatcagtctcattataggggaagggcaccaatggcatcctctccaccactgcctagattcttagttggggtcatccctgtggatcccctaacatttcccctgtgccagacctctctccaagcctgtactgtctccctctaagaaggcatctcctttcttgccctcctctatcttaatgctcgatccttgcatagaataaacccctgataaacataagccattatcactgccacaaccaaactgtgcctggcactgaccgcttgtaacctgatgcctctgctctttcctccatgtccacttcttgctggaaggaaagagaaagcagtgacaagaagaacatttctgacctatgcaacccgctgagataacatcgttattatcaagttcaaatggtctaactgcagccctctaaattcaatctaggatctaaggactctctgcccctgatgctcatgccaacagcctcaagtgatctctacagctagagttttaaatgccatttcgttacaaaacacaggactgaaaagcatgggggtggggccgccggtggaggatgaactcaaactttgcaaagttggaccaataactaccacaaaactgaatgggattctgagacaaatgggcaggcatctctaacgattcctttactgtttctaaatgccatcccatggcataggcactctggaatgcatacattttctttcagatgggttctggggcagcatttgttaaccagtaactgggtgcatacagaaatggcccagcttttcaaggtagttgtctgtcaggcaaatggataagtcactttatctgacccgtagaggttggccagtggatctgaaagagccattgtgcaattatgggggagatcaatgtcctttaattttatactatccaaatgagggtcctaaagagaatctgaaccataaccctttgttttcttttaaatccaggctgctcttatgctataaaaatgataccaacatttactaggtggtgaagtttgtcttgcttatctttatatcttccttaggtacttttataggttgttgttacttgtataaaaataataaaagttctcataaatgagaaagttaagtagaaggtggagatcagaagtggctccatccaggcctgggcttgtgctttctgcaaccctgccctgcactgtcagctttctctgcaggtgcagaggaaggtagctttacttgtctctgcacagcacggaggacgaatggctacttcccctagattccaccaaaaaacattcttttctacccatcattagtccaaattgggtcataagcctgattgtgagccaactccatggccccagggcggaggagctggggaaggcgctgtactgattggtttaaggtcagattaactagctattcactttgacaaggttgagtagaatttctcttagaattctcaagcccctcctaggagttcgaggagtggggtcatcttcccctgaagctattatgctgagccctttaccaacagggaaaacccagcgtgcacaagtttatctgctagaggaacaattcctatccagtccttacaaagcctcggacatcagaactcaagttcccagtgggcctccagtcttccagtaagcagtggagttaggatttccaggttttctgattccaaagtccaccctccttccaacatcctgcctgagggaatgaacaaacaaacaagaggcagaggcaggttcagttgccctgaaggagtaggagcagtgaactgtaggggaagacttctgtttgaagtgggccacgcccacaagctctgagacacagggaaggtatttcacccctctacccatttcctcacctgtgaaatggaaattgcactcaatttgacttcattgggctggtgtgagagctcggtggggctgtacctttaaggaacactgacctgaaggaggtcaaatcttagtatgaacaggtatgttttgggagcagctggtcattttaatgataaagccacaccctgtgtcaccctacagaactccaggagaatggaagtgtgtgcagagatgttgaaaacttcccaagggccagtgttgtagcaattctagatgtgtagaacatgtctaagctcattcaaactctcttgcaggcaagctacggaagagtcctaggagaagccaccaaattgctttgctccttagaggctaatttgcaattactgggctgggatcccagtgctgcctgactgcttcttccttcatctcactaaaaaagcaaacccacctctctacactctccatcctcatcttcctcttctgactccctttgcatccacttttaggaagcaatttcttttctgtctggaactcaaggcatgatgtgagtgaccaggttccctgtggggcacagtgtgtgtcagctgagaaggcctcaggccaggatcacctccaaacataaaaccaggcaaggagattttaaattttcttcctcaaggaaacaaaaagctgaagagcctgtgcaagccaaaagagaggagccagatgttgagactctctcccagtattgaaatgattacaaagacaaaagcaagtggttagtggtggtgcaagtagaaagccactctttcactttcttgttaataaagccattcatttgattagcattcattacttactagcttgtgtgcttctgttaacatatgaagaaaagtaagttacagtcagctcctggaagacatttacagaaggtggttatagacaagatcacatctcaatgagataattaacttcacaactctgaaagtagccagtacaggtgctgaggagtagaggaatcactgtgtaatattgtatacatctatgattcatttctatctgggtaagccctttgcaaacactatttaggaatatgtcaggaaatagcccactggtctttgcagaattttagatgcacctcaagcttacacagtatgggaagaaaaagaaaacgcactcatcaaaagaaactgaaaggaaccatatggagaaaaatacttttgtcagttacttttgaagtgatacatttttgactccgatttaaagtttagaccctcagaagggaaagaatattctggtatgaatacaataagcataaatgagaagtttaaaacaaccagtatcattgactaatgggtaaggagagtctggaccaatcatacctgcggtgagaataactcaaattttattaacctatcaaacataggtaacatcatgggaactttgctggatcccactatttgtactactcattcaggaaggtgaaatggaaaatttccatcttacacatttagttctcctctttagtttggcaaacactgactttttccactgcgtttctacctgagtggactcttgtcagctggtgtgagtgtgtgcgtgagcttgtgttttaatagctaggcacactgttattggtgctattagctcaacttatctgccagctgaagttcggatttgtttctggctatgggcactccgtaggaacagggccctgatcattgctctttgcaagtttgtaaatagactgtaaatagactgttagatcgctcagactcacacatgtaacaattctgaagttttgctgttaagttctctctgggaacgtttgatggttctagccacacggttatgaatgcctgttttgactttagccttgaatcaaagcggcacagggtctgtgccttctgtgcctctgaggcatagctgcccttgccgactgtttctctactggtctttgaaggccagctcaagcagtcaggctactccaatgcactctggagggaattattccttcttcctccaccctccctgcacacgtagttgcgttcatcaacactgacaagagactatgaactttatacacatgaataacgactaattgtaactgttgattcaatttagaaccagccaggaagcaaacctcaaggtgtgcactttagagcacttccacaaatgtttaacagaggaggaaagatccaccctgaatgtgagctatacaatcccataggctggggtcctcaactgcctaaaaaatgagacagcaaggagagcaaccacattcattcctctgaattctcccatgatggaccatgccaaaacaaaccttgtcatcgcttaagttgtttttgttaggtatttggtcccagtaatgaaagaagcaactaatgggacttctgttgtgcttttcatacaaccaagagagaatccctttatgctgtaggacaatgatgctggaagaacccaggggttctgggccagcacaaccagctgtgcctgcaattctctcatgttcatgctttgaggaaagatgaggtgatctactcaggagcctcgagattttactctatcctcggcactgggcgaaggccttaagtaacatttccccatgtccagagcctgccaagtgtaattctttttgtctcagtgcttggacagactaggtacacttgagctggcagcagggcactgtctgctgagtcagctgtcctgactcaggggttgagataaacacaacatgggtctctggagagagaagatactggctgggctatagttcccacctctctggctggaaggctaccaggcatgattcctaaggacaaacgatgaggagattcatgggaagggaagggtgacaactttgaacaccctcacttcctttctttcccactgtctctcatccctctcctctgaccagttcagtttggaagaagcccagatctcattctgagtcactctagagttgttctggtagcagtccggggtcactgtaactcttggactacaagcacactgcagatctgcgttcttgcccccaccccaagcatggcaccgagttagtggtaaatgtattaggaatattagagacttgtgaaaatgccacctgaataaaatgccattcccacttctgggctcaaaataatgaagggaatttggggaaaattggtgactcataacttcccccactaatctcattgccatgagtaattgattaaagtaggctatagtactgagtattttctcttgtagcttagatacatcgtgtgagaagtttcagaagcttttgtcaggacccaagacatcacttcatcatactatgtatcaaaaccacagtatttcaatgttacctgaaaggctgacaaagttttcatgttttcctccctcaccccaatccttcaccctggttttacttctgcctggggaatggcctaagactgtgaggagcagattttcccatgatgctttgaacttgagcagcttgctctgctcctaaaggcttcagttcatgaggatgggtttttatgtgaatgtcaggcatgtcgcaataactggccacaatggaataatcatggcaatttccaccatttggtttctttgtttttgtgatgttgctgcatgcttcattttatgagtattttcttttcttatgtgtgtggttgaacccatctattgccatcctggacttggcatttgtatttaaaaggagatgaagaccagagagagaaacaggaaattgacagtatggcatagcgtaatgcttgctgttttattccctcaccctttacctctgctgacagatactctggtgttctatagagtttgtgtcctcctccaaaagaaatgaggtttgtgaaaactaggtttctcctggtgatgctgcttattaacacagattaagatgtggtaacacttgtgctgaaataagacacaaaaactgccaacaatttttttttttttttttttggtttggtgttctgggctaagtcacttgtgtcctgagcggcttctatgggatcacagcatctattaaaatgctacattgtataacagaatagactctaaggaggggaattctctctgtgtatattgtatgtgtttacggtgtgtttgggtgtttgtgtgtgggcacaaatctgtaaatgcacatggagaccaggggtctgtccatgtaggtgttttccttgaccattctctctctctctctctctctctctctctctctctctctctctctctttggtatttcaagacagggtttctctgtgtagctttggagcctatcctggcactcgctctggagaccaggctggcttcgaatcacagagatccgtctgcctctgcctcctgagtgctgggattaaaggcgtgcgccaccaacacccggctcattttctctctttttatggacaggatatttcattgaaccaagagctcactgatttggctagggtggctggccagtgaactcctggcatctgtgtgtccacccccatccccccatccagtgcaccactatgcttggcttttgcataggttctggtgttctgaacccagcccccccccccccgggtcctaagacaacccttaatgactaagcaatgtcccaagccctgaattagtggtattctaagtgtctgtggcaccaagtccatttcagccaccacgaggaacagaataagactcactgcacaaaggcctaactgtgaatgttgcctgcaacagacacatggaattccaagcaggaagtctttgctttctgtggcagtccatagtggatccaccaacagtaggtcttttttttttcttttctttctttctttctctctctctcttttttttttcttttttggtttttcgagacagggtttctctgtgtagctttggagcctatcctggcactcgctctggagaccaggctggcctcgaactcacagagatctgcctgcctctgcctcccgagtgctgggattaaaggcgtgtgccaccaaaggcatgtaatcagtaggtctttttttgtgacagacttctgagggctctgatcacaaggctggggatgttgaacttcaaggaaaataccactgtacacaagcaagatcttccaagagagtgtgcccattcctcccagccagtcttcaaagtgaagccctggttaccccacccccacttcctttagcccctctaccccgtggaaggtgtcacaaagaccctctcggcattccacagccagttttcaaatagtcactagcatccaatcccacacatttgggtcccttttgccatctttcacttttctgtttccactctctctcctttttactacaaggattttctgttccttaggatttgacaactggtcctgtagaagggctgacacatttttcagttagaggagagagagagaggagagagagagagagagagagagagagagagagagagagagagagagagagagagagagagagagagagagagagagagagcgccaaataggtcccgaaaggtgaagagactctctgcggttaccatgctctggagttttatgggaaggagcttgtgcgcgaatgtcgagagctagacactagctggcctggtgaccaggagcccgcccccatccctccccgccccctccggcgctcacactcaggaagcagctggctgcgggccggccctcgcggccgcacacacatccacactcctcgccgggcagcctcccgcccgccctctttccccttcccctctccctgcagccgcgtccctactgcgccgcccgggcagcccagagcgcggcgcgcaagggcacgggagccaggggccgcgcacctcggggccgcggcgggcccgggtccaggctcgcaccggcgctctccagccgggacccagctcaaacagccagcatcccgagcccgacccttccacgcatctccccgacccggagcgaggatgagcactcggggccaggcaccaagtcgctactcaactttgtaaagacacgattggagtgtgtctgtgtgtagcggggacagcgggctgagctgatgccgagagtcggcccgcagccctgcctcctccttcgcgggccgccgccgtcgcagccgcgcgcgcacactcacgaccatcgggccgcgtttccgcgctccggccccgggcttggatgcgagttttcatttccgaaggaggcagagcctgcgcggagcgctgaggggctgaccccccacccactggtcgccagtgctgtcacgcgcggtctggctgggagaagggactcgcgcgcctagctttgttgtggaaatccggttacctggtaagtggatgccataggaactttgttccgcaggcgagaaggcgctggagagtgtgggggcggccagtctcagagatgcaaactcgggattagaaatagtttgtgcacgccgggttggtggcggtcgcgcggatttgagggcacgagtacccccaactccacagactcacagggcttctggagacctaggcacaccttaccgaggctgatggcaatactcatgtagcccgcagactggctgacagttgcctaagagcgccgagtatacatggaaaggaaaccaacaaggtgttgaagtttagcttatgagggagagtctctgtgctttttaaaaagaaaatacaggttccagaaggctacacagtcagggccagttacagagcgctccagcacggcgcgcgccatccctcgcggggttctacttgagggaaactttggcaaagtggggaatgatggggtggcctgaggtctttggctcacagtcggggcagtagttgtatttccggcttccacgtgtttgtggagcgccacgaaggctgttttccactttcgtgtttcatccaagtgggtgtccccattgttcagggaggtcctcgggttgggggacacagctactagtccggagcggtgcagcgacccgcagccgccaagtttttaactataacctcccacgccaccaaagtgcagacacattcagacaccaactctccccgccgggttcgtcacctcgcgtgtacatttttatgggccgggacaaaatgtcagcactgtttggggaatgtctcagtctctgggactttgtcactttgtcccacttcaagactctggtccctataaatgaccctgtgtctattttgaagccggccgggaccactttctggaaagcgtgagtgagctgttggcaatcctagacacacaccttgccccaagcgacagttccaagttactcactagagctgacaagtcacccaggggacgaggaactcacccaagtgtctgaaaaccttggccggggcggatttgtcatcctatggatgattcaagtaggtacctggagggagacaatttgggggaaagggtctggctccacgaggtcgcgcccttggacttggtagtgtgtttgggaggcgacagcaaaacgacacctgggggtgaggggcttgcaccaaggtccggacgcgggagggattctgggtggtgcgcacacgagtgtggctcccgggtctgaggcccgctgtgcgccggtcccctcggtttgtcctggcttcctaactggcggctggcggcggcctttctgcccccgacttactcagtacggggttgcacaacaggaagccggcacgagtttgttttgttttgttgcattcgctcgctcgctcgctcgccggctggctgacacgccgcgggtaaggggcgggggcagagcgggggcggccgagtgcagccagcaccactaggggccctggcgcctccacctccggaccccgcccctcgcttacctacagggagcccagggggccaggatctaagaccctgacagggcaaagctgtgtgtgtgtgtgtgtgtgtgtctgtctgtgtctgtctgtgtgtgtctgtgtgttgggggtgggtgttggagactccaggagggctgtctactcactgttcccaggcacaattctgggccctgtaggcccaccactactccagattcttctgccctgtgtacctctcttcctggcttggcttgcttgacaccagcttggtcagatgggatagagggtagggggtcacttccggaatcctagggagcagtgtccacggggtcttcagcaattacaaccttgtgtctcctagagagggtacgttcccaatcctgtggagtctcctaggacatcatcaatatcttgagaattggggtcggtggtcccaggtgatcctagagttggcaaggaaagagaagttacacagctgcctccctgtggaccagtccttttgggttatgggacctggagtccccagaggggaactcttaacatcctagggggcctggggaaaccaagactcaaagactcaaggggttttgcccaggaacccctgccaaacttaagtatccaggaaaaaacactgaagtttctcagttgagagccagtggttcttggcctgaaggtgaactcaagacaaatgcaaagcgtcttctgcctgttatgaagctttgatgagtcatgatttcggccttgggtggtagccaggctgttccccaaatgtctccttgcccactggacttcactttttagattaaactaggaactttttaaattgtaaaaatggacctgtgttagtttaaatcttcgtcccccttttctctcttgtttgcagtgaggctacacaaagcaggtgcaacctgcaaaaagtttgcaggaaaaccatgaaggttgccccaggaaacgttgatgtgatctaaagagagaactgtgtgagagtgtatgttgttttcccctttacttctgcagtgagagctgctgacatttaatgactttactagcgtttaccacagttttcatcgagactagctccaaccccactcctccttgaattgaaggaggcattgttcccattccttttggtgctctgttcatttcttttcttccatgctgggaggactcaaccctttttgacagtgagttagttaattctgtgtgctctggaatgatcccctctccctttgaggtcagtctgggcagagtggccatcctacaattcattgattctaccagggtttccaccgtttctaccagcaattctaccacagttcccactcagattagctgaggtctggataactggggttggttggtttgcttgggagaaagtggtcctcattccaaatgggatgcaactctcttttgttggatgctgtctatactgtacctagtttagaatttttacctggccaaaaaagaatggggagagttaagtaaacggaactagtgtttttgtaaaagccctgccttgatttatgtggcagagttggtctttccacagtttgaaaagacaggtcagtgttcacttgaccttcttagtaggcccgaggagatcctgtctacattgtcctcccaggtcatcgttgctgatcattggagttggaatgttagtgtttaattctcccagattgtaggagttatttcaaaggagcggatccaggaagaggcaccagagcactctcttatccttggagaagtcatttcctgtgtttctgcaattatttttctatagaggaagttctattataaataaggtgttaatacaggattaactctttgactgtttcataaactcatttaggactgaagaaaaaagtcacataggtagtttatacaataaaactatggtggcatttttatttaagaagaaagagacaaaaaaggaaacctttaacatgacattaatagtgagctgaatttttataaaagatgccaagttccaggttttagttacctactttaggcagagttgacacacaagtcaacatttttattaacgtagaacaaaatgtccatatggaagatcacacccgttagcttctgaaagaggacatacccaacaaaggagcatccaaggagcatctctcacaagtccctccagtgactgcctccctttcagtttgtgggttgcaatcccatttgtgggtcccatatcatatatcatgcatatcagatttttgcattacaggttcataaaagtagcaaaattacagttatgaagtagcaacgaaatgagtttatggttgggggaggtcaccacaacatgaggaactgtattaaagggtcacagcattaggaaggttgagaacccctgctttaaggtcacactaccctcaatcctaacacttgtgtgagttttcctgaacaagtaagtatcttatgtaattggaatagttttagatttgtttcatctgcatgcaactttatagttggtcagatagtgccttttcccttaaaggagaggggaacagtttggcttagagaaagtagttgtttgagcattacttaaagtgatagaactaatgagaaatacaagtgagatggatcatatctattcctgtctggtacctacctgagaaacatgcccggtgtggagatctgggtgagcaggaaaaatgctgaagcgtttgcattggtagccctggtgtgagggctaacactccacagcaaacaacttagttctggcactgaattgactgtgaaaattgcccaccagagtgccaagattcaggctaggtgattgagtctgctcagaggacaggataggatttctgtgttacttcttcctacttggagaaaggaagagaaacgagactggatagactagaaggcatacagctgtaattaaactggatccacaggtcacagagcatgggactcgttattgcattgtcacatgtcacttataccatatttattcagataataaaagataagggcagactatatatatcttatactttctgcataatatgaatagcaaaaatatagtaaatgtatacatgtgtaaattagtattgaaatagctgtatgataagtcaggtgtgaaaaggacagatatgtaaatagagtaaatgacaatctctaaatacaagggctaggggcgggggttcaaataaatacaagctagacacaacctcaaaactcaatgaagtgagaatttagacagggaaataaaacataggcaaaaagccacagtgcactgtagaatggtaggagtgtgaaatggaaaatatgtgtggagtaaaacagttaatatttgttgggttctttatgtcctggcactgtactaagaatgtgacatgcattttctcatatattaccctgtaatgtcatacgcagtgcacgatagtataattatccccattggacagataggagacatggaggctaacaggagtgtgacaggcataaaatgggcttggagagtgagtaaaagagggcttgaaggtggttcatttgataaaactcttgccttgcaagcatgaggaccatgtgaagagctagatgaatgttttccctatgttttcatcatgacctgagttctgaccctagaacctatgtaaaaatgctagatacgatggtgtacccctgtaatgccagcactggggaggcagacacaaggggatcagttaagtgtagcatatttggtgacctctgggtcagtgccagaccttgtttcaaaggaggtagagtcgtggggttgacacctgaggttgtcctctgttttctacatgcatgtgcatatacactgttttacattgatttgcacacatgcaaacttgcatacatgcacatatccaaacacaaactgagaaggggcctgggaaactctggaggtaagtttcaagtgtgctagagcgataatccagtcattttctgtcttgggaacaaaatcatgggatttgtctgcaaggcttgaaacctcagagatgccacatagctgagcacatacttgagatgaagaaagtagtggggtcattcttgtttgctgtgatctctaggccaagaacatgaaaggctgcacgttccttcaggggcagcaagccttacggaactgtagatgagcagataggctctagcacaagatctgaccttgtcccaggctccttgataaagtgaccagtttttctgaacatcagtagtttttacagttctgagccagagcttccaagtttcatttctaggcctgctgaattactgtacacagaaagccaaccagaggccagggctgagtcggacttttgctgtttttgtgtgtgaagaaatagattaatgttttcccaaccttttcagcatgaccaataggctccactcctgtctgtaacttggctgagtcattcatgaaggtttaaacaagatttttaataaatatgttgtcatgttgggtaaaggcctagtcattgttgtggacactcatacttcttccctgatgtcagtgaacagaattaacttgtataaaacttctgtctaccaatgactaaaaatacttaacagtgggtacttttaagccgtaactggggtgaagcagagaaatcacgcagtccacgtgtgacagattttttttaacaagcaagcttgctaaaaagattctttggtctagatgatcagctttgcttgtagaatcttctataggtagcttttttcttacccttttgagaaaattgtgattttagccttaaaaatagccattcctgtagaccgagtggtaggtaatacaaactgagtgacaaggaaccctctttccatttaggcatagttcatttcccttgcacctctttgtgtggggacagattttcatattttctttacaaagatcattctccagccagtttccactgcttttctattttttcgatgaagagggctttgtgtctcaaatgatggccatgtgggactcagtcccagcagtgcaggtaattaattcaggggtgacatcataggggatacgttcattttttccatttcagattcttcatctcaggatctgatggttaactcatattaagaacacatttcgaaaaaacacagggctaaaaaattgatttgtgttaatatatatagctattccttattttggtttttctgttagggcatggtttgattcttgggatggctatctatgctctataaccaggaagatctaaaaaaattaataattattgttactatttatttataagtgtgggtgttttgtctacatgtgtgtctgttcaccacatgcatgcctgatgtctggaaggcaagatggggtctctctttctctctctctctctggaactgagttacagacagttgtgagctggtttgtgggtgccaggaacagaacccccgtcctctgaagagcaaccagtgcgctctctctctctctctctctctctttttcgagatagggtttctctgtgtaactttggagcctgtcctggaatgctctgtagaccaggctgtccttgaatttagagatctgcctgcctcagcctctggagtgctgggattaaaggtgtgagccaccaacgcccggcacaacccaagctctaaacctttgcctggttgtctcttcagatcccattgtcagtcggtttttatgctaatgctattgttggttcagttgcttatcagcacaagtaatcaattgctctctattgaggggccatagatggcagtggttgaaatgtagctttatattgtttgaccttaaaaaaaaaaaaaaaaaaaaaaaaagccaggtggtggtggtgcactctttaatcccagcactcgggaggcagaggcaggtggatcttgaaaccagtctggtctacaagagctagttccaggacagcctccaaagccacagagaaaccctgtctcaaaccgcatcctccccccaaaaaataaaaataaagctgagacagaggcaggaggatctctgaattcaaggccagccttgtcgacaaagagaattccaggacagccagggctacatagagaaacccttcctccaaaaacaaaacaaaacaaaacaaaacaaaataaacaaacaaaacaaaccaaaacctaaaatgtcaagctttcagatcttttcttcattttacactattttgctatttcttttactttgtttaagtctggctgtacctacagctgctgtttgtaggtgtttgggtcatcaaagagtccaaatgattttctaacactaggttttatttcgttttgtcctgactcaccataaaatacagtgtttatcttatcccaaacacactatgtgcacacagatatgtacacctgcaaagaaatgaactagaacagttcttgactgttactcttgatgtactctgatagctttaaatatattgcagtctgttctatttgttttatattaaaaaaaatactttccctgttgagtaactgataccataggccttcaggggattgctgccctgtttgcaaaacactgctttagagtgagtaatttgggaacagtaggtctggaaactcagcgtattcccacctatgctgtgccgaggcatggccagtccatgactgcctggccgggcatcccagtttgtgctgaaatgttttggttgcaaattcattctgctttcttacgatgattattatttttttggactgagtgaacattctttgtagggccacagctttctgtactcattgatgaattagtgaccgaggcaaagtaatgagacacttctcagtaattattgctaaaaccagtgacgctgagtaaagtaggaggctgtgagagtccagtagacggtctcaggtgtggaagatgaattctgggagcgggggaggtgttacctagcttcagtgttgttctccagcgcagtctctctgaagattttgactttctaccagctgtttggtctgtagtcattatcattgtcatcatagtcactgcctggatcttcagaatgttgcttttgactttcagtctgactactaactaggagagggtttctggactagaagtccgctcctccatctcctcttttaactctctacagccttggccatgctcactacccatgctgtgaacttcatagctacagactttaaaatgcactgtcaggtagtttcttccatatgcttaagaaaaattatcttcattttagagaaaacttataaatagaaaatttagagtagttaacaatatgttgatcatgaattagcttagagtttggatccacagatgacatcggagtcttgggtttttgcagacaacggtgtcttttctacgtgctctctgaaagacttgggtggaatggctgctgagaacactcaattgacttattaattagtgatagagtgagatctctgatttcatcttaccactgagtgtattgtttgttgtcagcacgtactatgtttataataaatgttctgaccatcttcattaggccttgagaagacttgagtaaagagatgtatatgtttcttgaagtttttgctcaacagctcaaatatgaatttctttttgtgaagctttagttgctttgttggtttcagtgcatacagttaggaagccacacaatcaactatgtcttgctgtggatacactcatcacaatagaggaccattcagttttggtgtagagaaatgatactgtccacgtccaatatatttcctccataatatcctgctgcttcatgggctcatgtttgcactttcctcttgttgaaattgcagacaagaatcactctgatttattggtgacatctaatatatctgtgtttatattgttgccaataaagtgacttacatgattggtttttgtttatacagtctttactgaggagtcagtcacctgtgttagaacaaggtacattctgcttattaaaatgaactcttggggtataagaacactcactcagctctatctgtccttgattaaattgccaaatgtgcttcacactgcaaccgtgcatgagaacaccttacattgtccatcaataggcttttcgtttctatagttctggctacaaaaagctgtaacaggataagccctggagaatagcatgggcctattaaacgatgaaggcagcgaagttgaaatgacagagcttaatgaaattatacaatcattaacccaaaaggggaaaatgaaaagagtaacatgtcatagatgtcttaaacacacacacacacacacacacacacacacacacaccataaatgcatgcccacatttacttacatgcatatatgtatatatgtaaatatgattatattcaggatcagttttctacctgaccattatttgtgcttcattaacaggttttgggggtttttgttgtttgtttgtttgggttttttttggggggttcagggcaagaaatgctctcagcgtaaggaatggaaaatataacaaaggctaaatgtagcctaaggaaatgaaatgatgtatgaaaattaataattaactggctcatcagatgaattatgactctagatgagtctattaatggtatttactaagaaagggcctttggctgtaaataggcattatggaacttgtttctaaaattttctttttttttaatttttttattttttttgtttttccagacagggtttctctgtgtagctttggaggctgtcctggaactcactctggagaccaggctggcctcgaacgcacagaaatccgcctgtctctgccttccaagtgctgggattaaaggcgtgtgccaccaacgcccggtgaattttcttgaatagataagttaacattgcttttatttgtttaatcttcttaatccacaaggagcagtgcctggagccctggaaagaaggtggagtcatgattttatattttgatcaaagttaatgcttttctagaaaatgagtggccttattaaatggttttctaccttagtttccttaggggttaagtcatttcctctctgacctgaattatgggagtgtgttttaagagtttgaacatggtcaaaaggaaagatttagtaactcattagtagagtgaacattttcactgtgagacccaatggggcataaaaatcttaatatggcaaaatggcatgtatgaaaaacctgagatttatatttctggatgctctttgtcttttcttttaaaacttctttgtctttatttgcttgtttgttgatagtcgagtagagtgggcataagacaaaggagaagcttgtgaaagtttttaaatgaaaggaagggtctggagaaatgtctcagtggttagaagcattagctgctcttgcaaaggacctaggttcagttcccagcacacacatggcagctcacagctgcctgtacctccagtttcaggggatctggcatcctcttttggactctgtgagtaccagtcaggcacatagtgcaaataaaacactaatacatataaaatataagtagatacatctttgttaaaaagaggttctctcggtgaaattttcctcattaagtttaggatactagtagctgtggtttttattttcttagcagtattgtaagtttattgctgtattccgttgttgttagtgctgtctttgttcatggtgttaggggaggcctggccctcttaccattgctttaattgatagagaaatagagtctacatattaatttgttattatagtacatgagtgctttaaaaataatatttgatatataaagtattaggaaaacaatgtcaagagtccttagtgattttatttgtcttccccaggcttctatgaatgaagaactgagtccagggagcttgtgacctaggtctcggctccttagcttctttagtgcttctcactgaacataaatcttttcctaaagctgagtggtttattcctactttattacccagtgggcttgaaatgatattgtgatcaatgacttagctcaaaaatacataaaatattacactgtgactaaactaaattgatttctaggtactagtatctaatgctcaaaagatttgttgacataattcatgtgaaaactttaattttaggcacacttccctatatagtttctttcttttcatcttatattttttgcatgtagtttctgtcttttctttcttttttctttctttttccatctcaggggtggttttgcttaacttaaatgctgttcaccattttttttttgtttgtttgttttttttcccttgcattaatcacttaatttttctggctgcttttttctcagttataaaatttaagtacattctgttttttctttaaacctgtttcaatcaagagtgcaacttataaaaaaattaagcaaaataaataattcatattggttcctcacattcccttcttgcaggtcttttttcgagacagggtttctctgtagcttaggagcctctcctaagagggcctcctacagaagctcactctgtagaccaggctggcctccatctcacagagatctgcctgcgtctgcttcctgagtgctgggattaaaggcacgacgacccagcttcccttcttgcaggtcttaatgaccaagcctaattctggaatacttagtgatgtgttttttatccagattttgatgagagccacttgtatatgatattgggacaagaattactctttagaaaaaataaaacaaaccaaaacataaatgagcacagtcaacaaatctgaagacacttgccacttggacctggtttaactgactccagtcattttggactgttcttcatttttaaaaatttgccaatatggcctatttatttgccattttttccttttctgtggcttctgaataaatgcttcctgtgaaagttcagagtgctcagaaaccactattttatgaatgaatggggaatggttggttgtacagtgtagctccatgtactcataactgataagtgtgtggggagttctccatagccaaagaacagacttgggaccagtttggtagcaatccctattcttactgtttcataaaggaattcagtcatgcaggtttggataacttggacttgtctttccatgggccctgcggtggcagggggagtacaagtggtacctgtatggcaggcggagttgttgagtgtctcattggattggcaaagctaaatgtcaccaaaggatgtgattcctgtcaaaacaagagtaaactccgaattttacattttaattacatacaaagtgcctcaacacaggcaagagtggtaaattttatggaaagcacagtgaacatttaaatattttttttgttttcctaaaatggtgaaagaaaaacaatatccttgaaaaagttcccattccttggtagccttcccatgaagattggtgcagtcatttcttttgtagtttttggagttgagttgaaaatgtttgttcaagacctcaagtcttgatcatacagggaaagaagtcccaagacttatcctattgaggacatatggatattattgacttgttctcagtcttcatttcctgtgtttgttcagccgtggctacttcctgtgactatcttgtctccataaaagatacatagtggctgtttcagacatattcagtagaggcaacataatgttacttggccacctccttggatctactctgggatcctcacgctccagagtggatctcttcttttcatgatttagaccctggaagtgttgatgccatcacatacaagtagaggtaaactctgtggatacatttgtactttttttttctgctcattggaggctccctaacacaatgatatatagggtaatacagtaggctttctgggaacacactggaaccccacacttaagagctccttttctcccatgctttctaggagataatgtttatagttctctcctttctcatctcccccactatgcttttctagttccataactcagtatcaatatggatctaaggtcttgatgctgctgtaagtatttaaatataaggatctatgaaaactaaaattcccatgcctagagttctgatctgcaaacctgggtacctattagaatgaacattgtgttggctttgtctttgttgactgggaacttaagaagtttagtctcacagctcctggaggttggtgttctggatttccaaagacactgtagggaaaatgaagtgtgtggccagatcctctgggaatagagtaagtttccccagtaagcagttcccagtggactggtagtagctgccgagagcatcatcttgagaagggcacagtagcaaacagaacaatgtcgtgacccatctaatccatgcctcccatgaacgcagaagagctgtgctttttatgatcttgttctacattaagaggagagtttgccaactgtgtttctttttgccctggtaaaaatgctatacaagttgaaaaattcctgtgtcttattttcagttttacctttcccaacacctgtatttgcttttgttttaaacagacttatcacctatcccatggatgagttacttgactttcccctaatgaatcactagtgctgttggatattgaccatcttggcctcagggctttcagaatgaatggaaggtcctgtggcatgagtctgcatcgtacatcaagaaccccacaggggcctggcttgttcagtggtcaacatattcctcccatcagagcctcctcaggccctgcgggactctcatcctgtgccagcacacccagccccattattgcaagtctcactaacagcccccacctgaagatgtcctccggagcagggatggctcctcagagcaacatggctgtgagccccctccatctgcctgccttgagccccaggagacagttactcaccaatgggaagcctcaatttcaggccactcaggctgatggcatggcagcaccacttactctaaagcacaagcagcaagaatttggagaccacttttcttcaaatcccgagaaaggtaggattgtcattttggaatcttttaaaaatgggaatgatttatctccccccatgtctgttcactgccagagagttctatcgaaaatatatgtaattcagcatcagagtcaaagttcaccgtctcatgcttggtaaggggtcgggtgtgtacttgtgtataaatgctaggtagagtgtgtgacaccttggaatgtgaaacagagtggaaggtaaagtagaaagatcagcttaaaagggaaatagtgaggaaggtgatggtaagagggcaggagcaaggtgatgaagtctgtcttctgcagaaatgtggctctgccctggcttatgggggtggtggggtggattctacaggctatggaggccggtgcttggaaggaaaggattaaaagggagacattgtaataaccagaaaaatgaggagcaagtaaatataaataagaaaattaagagtgaaatcaacagagggaaccaagctagaataatgtataactcaccccccccccccttatactagagattgaaaccatggccttacagtgacatgctaggtaactcctctactgatgagccctatccccaacaagaataataaacatgtatttaaaatttgtgaggaactagaaaacctcattattttgaaacacagcatgcattttcaactcagtagtggttgggttaccatatatttcaaattaaagagtagttattgaggactggtaatgtatttgaatgacactttctctagctactggtgtggtgtgcacctattgaatttatgttgcagatggcatgtgtgtttaggctaggaagaaaaagagcctgtatcctacatgatacagctttttatgtaaaatagctccgagtctattccttaaggactttatcatatagtattaaatgtttatattgaaaaattcttgtcctgttcggtagagttatttattagcaggcttctggacagcctcttacctggctaatcaaggtgaataatgatttataacagacatgtagccaaagacttgtttgccttggtgtctgtgcattttagtgcatactgtatttggcctaaatgaagagattaaaaacaaaacaagccgggcagtgatggtgtacacctttaatcccagcctttgggaagcagaggtaggtggatctctgtgagttcaaggccagtctggtctacaaagcaacacagagaaactctcctgattcaaaaaaaaaaaaaaaaaaaaaaaaaaaaaaaagaaagaaaggaaaaacaagcaagcaaaaaacccacaacagtaaacatacatatagcttttatatttctcttatactttcttaatctctttttttcttatttctctttagttctgtttggagttgtttgctctcctaaaggtactaatatttaagttcaggtaaagtttccctaggggccctttttagactagtctatcaccgtgagaccacagtgctcatggaattgattgagccctatttcttcctatcggatgcttctgattggttttggagggaatccaaaatcaaagtccccatgcttgcatagcaagcactttatagactgagccacctctgtagctccatctggcagcttttgagagggctccatggccacatgtttggcagatctaggaggacagtaggatatgtaagcacacatttggaaagtgaagtgctagtcttgtaactgtactcagttgtgtttacgagagagtgtgagtgtattcatgcatgaactggcatggcatgtatgcacatgggggagctttctagcatttgttttgggtggggagaaataacacagtccaagcctggagggatggtgagattgggggcggggttctgattactgcctagctgcacatggcttggaggtgtagagttttagaagagctgatgctggacaaaagtaaacagaatgcagcatatgaagatcatgagtgactcaccaagaaatggagatgtgtgaggctgctttgaccttaggacagcatgtaacttggagaataccagtggaagctcccagaaaaagaacttgagaatgagagaggaatggagggaagagaggaaagagagggagggagacagcatgagagagagagagagagagagagagagagagagagagagagagagagctagaaaatgaatgaacagaaattgtcttattataaggaatttgctaataataagattgttgtggtagcccaggagagtaggtgatttaattccagtcagagcagagggcctgagaactagatgagccaatggtagagttcatgttcaaaggccagtaggctccagactcaggaagagttagtatttcagtgagtccaaaggcaagaagaagaaaccaatgttccagtccaaaagcaaccaggcagaaaagggttgcccatcatgtagggaaagggtcaaccttttgttctgtttagaccttgggatgatcatcggaagtagtctgtcatcatcaaggagggcaatccccttcctcagtccgctgatgtaaagttaatctcatccagaaacaccccaacaagaacaccaagaataatgtgtcaccaagcattgttgttcatgtagagtcccacaaagttaaccatggtaaggccccattgttttgggatggtgtgtagtttacacagtaataagaagagacttttctgagttccagaactgactgtactagctcttgagactgtatccagggaatttaagttcttgggatgttacaggagaacactggtgggaagtgtagatttgatagtgttatttctcttgattacagattatattattccactagcctagaaacacagataacaatggcttcagcattctgtggtgtggattccaaatggtaccctgaggtcactggaaactacagtgaacttcaagagtcctaggacactttaaattttgaggggatcagagagatagatacatagcattctttgcccaccaggtaaacttattgctagtggagggggcactttccattgtcaatttcattacggtccttttggagatctttgcgaagctgcagtctcagggtaagtaagcactttttcttcctgttcctgaaagcattctcaccgcagccagaagaagctagataagcaaatgtccatcacaagatgaatgtgtaggcgtaatgtggcgatgcaggtatacaccacaagaaggaaattctggcacatcctatagcacacaaacctccagtaaactgtgctgaatgaaatatatcagcttcaaaagcatacgcattttgtgagacctctggtataaggacttggaacgatcaagttgatctagatggtggtggttgctaagagcatgggcaacaggattgagaagctagtaatcagttggttcagagatttggttggcggtgagaaacatttggggtttggtaggtagcttactatttaatttttaaagttatttaattatttaacatttggggtttcctttgagagagtctcaaaaactgacctggcattcactttgtagcctaggctggccttgaatgtgaggcaattagcccttgtctactccttgtctctgccttctagtactgagattactggcatgagtcaccacactgggctattttcctacagttttaggcagcaagtatatgtgagcaggctgccagtgtggtgagatctgccttattctaaggtctgggatgtggttagggtatacgacggagcttatatccctcctgtaatgatgcctattgaatcaaacaggtatgctttttcttttaatttatgaatattacttttgcaagcagctaataagttgctagtacataaatgctgttaagtgttaacacccaactccttaataaatgtggctgttaggtgtttctgtgggcctgaggggaccataaaaacacagagacactcagctggccacatctttgagtgcccagggcctgtcatgaggccatttttcttatgttcaacatgaggccaatgttggctttgcagttctgcactgtcaggcctgggacagtgcagtgttcctcttggctgcacagtggccacctcagtccagctctgaccagagtctgccttctgagaagaggggggaggaaggataaaaggcagaaatagaaacagataatttccctcaattttgtaccttttgaacagcttgctgggagccctatcttgccatctctacctaaattagccagtcacctaataaacaactaattaatgagaaaagcacattgtttggtgtcagttctctctctctttttttactttacattattttgtattgtgttctattataactaaataactaactagttaattaatactttttttttgagagaaggtttcactatgcggccttggatagcttggaacttagtacgtggactagacaggccttgaacttagtgatcctcctgcctcagcataccgaagtgctgagtttacagacatgtgccactatacctaaattaatagatttgacttttcagcattttgctacatttatctttttgaagtactttgaaccacttgaaaataagtgacaggcactgtggtgatatattacttatgatttattgaagcttgcctgaggattcagaaagcaaagtcagcctcaagctgaagagatcaggcagtggtggcacacacctttaatcctaggactgaggagtcaaaggcagatggatctctgtgggttcaaggtcacccaggactatatgatattgaatcagcctaagagagtaacagagctcatgcctttaatctcagcactagcgagatataaaagagcagggtcttcagtagtcagttttaggattctccagccacgttgaggagagcatagcagtctgaggtttggtggagccaggaccacctttcagtctgagatagaggtaagagctagtgctgctttgcttttctgatcttcagcttgaacccaatatctgtctctgggtcttttatttttcgtgcaacaaaacactgtgacatttcatctttaaatttacattcttcacatatatacacaaatacatgttcatcataactggggaagttaactcagacaacagtatcacttagatataattatatcttaatacccattccataatcaaattaattttgcattattttatattttattcataaattattgtctctctccacttactacccaagtaccctttctagctggtttttaatttagacagctttaatcaagtttgagtgtattatatatggatatcacagtgcttcaggttccttttggtagtcctctaatacctcctaccctggatgcatttgtcctttgtgtcaggttcaaattagctgtcttgttgctcaggccagtttggctgaccatttcttcacaatctgattcaggttagtgtaccctgagctcactgcagcttctctagctgaaatggtgagccctaggttcagtaggagggcccctgtctcagaaacaaggtggcgaagggttattggaagatgtccaatgttaacctctggactccacacccacttgcatgagtgtacacctccccctcaattaaaaggaagaatatggaataggtgattggtatgtgacccacagcactgcaccaggaaacaccaggtgcgctttgtcctaggactcacctggcaaacatgatattttcatcagatcactgcattgcagacatgtttcctgtcaaagttagttgataatgtcacactcattagcctctcatagctaactctctggtctgttctctttgctgagtgtgatggtggtttcttgattttatcagacctcatgtagttattagccggtgttttccttttcagcaattcgatgtcaaaatccttgatggatgcgggaccaaggattggaaggacttgtttagttcccaggtcaagggacttctgttgatcatagtgaggcatggtggtggaagcagcttggtcacttctgtaggagtctgtggttccttgcacagtagccagaccacgagccagaggttctgatcagagcttggagctgggtgtaacctctcttctctgccctttgtgcctggtgtcggccagcttggcagtatgtcctgatttctgttacctccccaaagaatacccctagctggggcaaatgtgcagatacacagcctgtggggggattttggattcagaccacagtagctgtcaagaggattttctcctcatctctttagtcttagggattctttcaaaaatgggtctctgtgactcattactgtcaaaattctttctgatgctcacattaacccaaatatggccagaggaaccctcttgaggtcagttcctgtgtcctttaaccatgttcccattaaatacttcctgttttcgcctcacttgtacttccctgccctggatctgaaatcacccactttcacccaaatcgcaagtatcttgtagtggcatgtttggagagctgtgtgacaggacatcagccttaccgcctctcagataccatcacttccaaggcctgcccccgtttagagttagggaatgcattggaaaatgagctgcctttaaaacacatcaccatgctcttcttctctgaaagtcagagagagcctgggtcgtaggcatcagcgtcttctctgttctgccctacaagaagggaaggggctactttcccttaacattgctgaagtagtggaagttagttttcaagttcaatgcttttaccatgctggttttaaatgtgtggaggtgagcaatcctctgctgtctgcacctcaggggtagcatgggagggaggtatagtgtgcagggcaacttgctggcctggctagggcttgtgaatgtggagtcccacttaggttgcaccagtgaggacgtttccttgcttcctggtccatcagaactcaactgtaattagacttgtagaaactcatttttcaaagcatttgggaaatcagttttatgatctccactttaagcacatttgacatgactatttaaatatttaagacatttctgcatgtgtagtaccctgaggactgtataattgggaagattttcattataaagggttttttttattttacctcaggccctctgacatttcttgttgggcttggctgtccttggagacaaaaggagttagttattcattagcatttgtaggttattcattattgttagttagagaaaaacagaataatatcaacaaaggacaccaaactaattgggattttaaaactctttggtgtcacttaaggctggtgtctcttgtaaagacttggttcaggaaagataatgtgaccctgggagggctagcacttaatgtacataaaataacacatccaattttgtttttattttacttttctaatgcttgttggtagttttcttagtcagagcatggagttcaggttagggattgagtcctaggtgggttagctagcttcatgttttcctgctgctgctctatcatgaagtttacaagattgccactgatttaaaatgttacttctctgaagtatgcctctactttattttgaaaaacaacagacaacaacaacaaactgtttacccccagggctgctgggaggaatgtagccatactagaaacagatgctcgggagtagcaatacggggaccccttgtttggaaaaaatacagttaaaaagagcaacacacttggcaactttttttttttcacttctgctttttaatcatttatatttccttgcgcttccaatgtggcttcctgtagaattagagcaaataaagttaatattccataaaagcctccaaaaataaccaaatcgaccagagactaaaggcattattccagttgagctggccagagtttgcatttcgtctggccagccaggcaggtgaagcacaatgtttacttttgtttactccctgggctacacaggggatactttgtgtgatttattgatgctgggtgtaaatcaaattgatgatgaatttccaagtattactgaatggcaggtacgatttgttccagttcaaaatgtgctttgtcagacttgtagcattccacatttaaaatacagtttatccagagaataacctttcccctggtgtagtactacaggatagcaaactgaaatacaaggggaatcagtcaccttcagcactttgaaaggctgtttgctatcagaattacatgggttttcctctcttaatatatcatggaggatttggcaagatctagaaagaaaggagtcgttcagtccggagtaggacctgtggtgtatgtcagccattggtagactttgagacccagcacagccagtgtgttagggctgatgttatcttcggtttagaagtgtgcagtgcgctgctgagggagtcaagatgactcacctgagttcattcatctaggggataagagtcagagctgatgcttcatgcaagcctgtcttcctctaggatatgttcctccggtgtgtttgggaaacttcgtgaggcttgggaaacactgatggggcatttttgtctcggggaagagagattaatagatcatgctctgagggccacacatacggtgattttggcactagaaatcagtcttcataacacaaaattgggtggatgggtattggaagtggatctgggaagagttgggaggagggagaggtggtatgatcaaaaacacattgtagggaattaaagataatttgtttttagacattcatcaagaacctttggcacgctgattgccaggccctgcaatggactgtacgaaatccccctgcgtctttttcacacccttactgctttttgtgattctcaagcaacatcaatagtattatatgcttactactcatcttaactaaaatgcaagggaactataaaagcaatacaacttgcgacaacggtactgataccaatatgaaagtactccagtatagctaaacttaaaatcgaaagaagccatgagacaggctaaaagtataattagccatattcctgctgatccacttaaggacctgctgacttgcatttcaacaatatggtgtatgaaatgatggcatatttctataaaaatggtgatgagtcctcccttgattggcattgtgactttagataatttagcatacataagagccatgaaaaaaatggactaaagatataaatgcagaccagacttgaaggggggcagactttgctgtctgacatattgtagacagtccattgtgtgtggggcagtgcagcgctgacagcttgctaagagaccacctcatgtcttaggtagaagaaatgaaagacgttaagaaggcatccctatgactgacacaaagacgtttgttgaccatgcttcaggtgtgggtcctgagttgccctctctgtcaaatttagtagaaatagatgattttgtgtcgtgtgggaaagcttggagtaaatgctgggggtgtttctgggactctgaggagaacctctcgtagttattttagtctagactatttaatgctagatgtttctggaacagttgactgtctgaaaaagcacaggagagctctgagattggcacatagactgtgatggtgggaagcaccaccaccctagggctagaggccggaaaggaagagggtgcaatgccagagtccagagtccataccctggtccaactggtcatggtgcctctgagaactggaaagcattgcctatccagtggctcttctagaatcaaaatagtaattatggggtgcctgttatctgtgagcatcactgttagtcttggaatatcctgtatggttgtaaaatcataagaggagcctcttctccttctccttctggttttaaaatcgactggagtgatagggtgttaggtctaggctgaaatcagtgaaccacgttatggagttcctctcaaaaatgtttgaagtgtttggaacaagcccaaagaagtgaagcaaggcaagaccacaacttccttttccatgtgttgtttgtcattttaatcagcttttaaaggatgatgacagttaatacataacattatatggtgtatgttgctatatattccagatactttgtattattttatgtctaagctgcttcaaaactcagcgaggtggggaccattgggaccattgttattactattcttcctgctttatagatgaggaaactaaggtctacttgcagcatttcttgaccctcacatagctagggagtggcaaaatcaggatccaagcctggcacttggctctagagcacatacctttagccattatgaaatgctgtgtgtgtgtgtgtgtgtgtgtgtgtgtgtgtgtgtgtgtgtaaatgtttttctggagagacaaaacatgcccatctactcacgccagatgtgtgatctatgacagatccaaagtgcagataccaccaaagtccaacttggcaagccaatgagttttaggggtcacttacaggaatatgggtgaggggatacttagaggatttaacaacaattacatcatcaagactcaccccagcactagggacagctcacagaaactggaaacctggagcatactgcgtagcctgcaggcagctcagcaggttgaagtggcctttccaggtgcctcagttggtctaaatgtcttcaggtagctcttcctgcctgagagtcctctttacagctaggctatgcttactctggcagggaggggcctagtgaattcgatatgtttcagggaattcttgaacctatttttattgtatttttgctgttgtttatatcactgcttaaagagctggatggaatatttcaatcccagaggagagactattagataacactctatctcttccacatcctttctactcctcttccataatgatcactgagccttggagggggcatagatgtctacctatggctaagaaacaggccaccatgccacagtagcagtcacttgttcaggagctttgccagagcttattagttgaggctgacaacaacagtgatttatttgcataaacacacacatttagagggcagtttggcaggagcatgatacccatctagtaaaaccatacatgtcttccccattgggatttatgacctccctagctacagggttttgttctggcttaatggtaccattcttggcttctctcttgtggaggggacctcaaatccaattggaagactgctggtcttacccaagatagctgaacccctgttgcacaggaaggcacatgctgcctggcgtgttggtgtcttcaggcacacagggtctgtgacctagctggagcattggtgacagttctcccccagtaacctgcataccccttctgacaatactaaagccagagaccagggtgggagtttccagttcagtcccagcttaatttttccatgtcgcacagtcaaaggatgtacatgtgatatcttcagcaataaggtcttaactgtctggtcctgacatacaaccaacagcagtagcaatagtctttatgatttgcagggcctcaggctcttccctggctaacaactcaaaggaaggtagctccttcctggcactgggattctcattcaataaccttatagtctctgggagtgtctttttccaccaatgtagcatacctttgggaatttttttgtttgtgtgtttcaattaacacagctctggtagggttgtaaggtaggtggaagtaccattgttcttggttttctctccagtggctttccaaatctacaaaacctttttgaacatgggcaggatagacaaagcaacatcctgaaccagcatcccataaggaatagtgaggttacaaagataaccttggtaaagcaccatcaaagtcccttgtcagctgttctgaggaagtgtcaggtgattccagaggttcacaaccaagaggatatgaaagtcagacattagtagggtctaatacagcatggaaaagttccatcatttctatcaatttcctcctccacagatcaaagctacgaagtatggacaggaggtgctagcttaattagctccctgcaatccttagtcattctctctgagccatttccacatcctagagctcttctacagagcctccctacattttccacacctgctatataattttatgtcaacttgacaaccagttaaaatcatcagagatgaagtagccttgaaggagaaaatatctacataagatcaggctgtaggcaagcctctagggcgttttcttaattagtgattcatggaagaggcccagccaactcttgatggtaccacccctgggctggtggtcctaggttctacaagaaagcaggctgagcatccctgggaagcaagccagtaagcagcatccctccacagcccctgcatcagctcctgtttcctgattcctgtcctgctcaagttcctgcccttactgcttttgataatgaactgttatatgtaactgtgagtgaaataaaccttttcctctgccagttgcttctggtcatggtgtttcatcgtagaaatagtaaccctaattaagatggtaggtctgacttaatctaacttggggccaaagggaaagaagaccctgttctccccagctgcacctgctggctcccacagtgggtgtagttgaagctgttgcccctccccccaatacttggttgctagaggagttcttgatggggcaaatcatctctacccttagcatagtctttgctatagggaactgtaccctctttagtctagggtgggtggttataattacccatccttgggacaggcttgactgtcttttgtagcaagagatataactactatgcccaaatggtggacacaggtgcttatgggaggggaggatttaggtgcactctctcttgctgctggccaggttacaggaaacagccagggaggatccttggagttggaacctgtggcagccacctgcctcttgtgtaagcatactctctcctaataaacctcctttaacatgtactgggtctagtgaatcttgattctcacacaatagtctttacttgtatttttctatcatggttttcttctgtaaactgtttctcaggcttgaaagccatctagtgtctccccaggagaaatttggcttttgatcagttattcacttgggaactctggctccacatgattcctgccacatttgtcttggagtaatgcagaaaggcctcttcctggactttacctttttactatctcttctaggctgctcactcatttaatgaactctctttatatgctgctgtaagacacagatctgctaatctgacttcatcaagatcttaccccactaatggactcagcaaagccactaaagctccacaactacctcaaggtccctgccagatcagcctttccctgaactcctctgagaacatagttctgtctggcccaggggactggggttctaacagagcttctcttcttattcctagttccttcaatagcatccgcccctcctctgtggtcctctagttcctgatatttacagggaccacaaacaagatagtctggtgttcctcatggctctgataagccagggactgatttccctgacactgtctcaggttatgcagccattgccttgaggaccgatgggtagtcactcaattttcctgtctccatagcatcagactgacccttccactcccaagtcccacagccgcacaaggctgccacaggctcgttcccagcttgtttaacagtcttccctaatagtagcttttcaagtgctgagtatttcctggtcaccctagtttctttccttggaccacacttaatgcccctgtgtgcatactggattgtgaattgccctcttttcccactaatggttaaccttgaggcctgtcttttaccttctctctctcatcccctctttaatccgatgtagttgccaaatcacaggctaatgtggatgctagcttcatctccctttctcattgcagtggctccagcaaggatgtagcaatcactagggagtccccagatgggctcacagattaatatgggagaaataaagcagagtgatacagtttggaatactttagaagatgttgggcttctctcgttcaagattgaggcacctgaagacctaattaagagagaaaagcaggcacataggtactggttcagatgtaaccacatcacttaggtccttggagattcaggtgagaagggattttaagtgtcatggaaactgtttgaaaggttttaagttagtggattcagatggcatactttacagttttgaaaaggatgtgtgctttctgtgttgagaacacactggttggagagaatgacggcacgaagataggttaggttaatgtagttgctctgctgagatagatggtgacttggtagggataaaacatttagattggaggtagcacatccagtaggagttgctaacgattacttttgcaccagtaagaatgggtaggaaatcaggtttctgttttgtacatatttggggcacctattaacccatcacatggactgtgaacatatatatgtatagtggaggtctgcagatgacactggattgtgtcatccagtagctgatggaagcataggcacacacccacagctaaacattgaactgaactcctggaacacagttgcagagagggaggagtgatgagcaaaagagttaagaccggggtggtgaaatccacagaaacagctgacctgaacaagggggagcgcatagacccccatgcctctgtctcccgagtgctgggatgaaaggtgtgcgccaccaccaccaatgggcaatccagcactgacaaagggaagtagacacagagtcccacctctgcctaggagctgattgaaattggtaacctgcttgggaaatgagaacttgtctttctccaatggggtatcactgggtgtatcaatcacactctaaggcaggcccatgcccaggagtcattggcaaatacaaaatggaccccgtgttccttttgtgggctttttgttttggtattattttggtctttgtttttaaattttgttttaaagttttgcttgttttgttttgagagtgagaacatgagttggctgagttaggaagtagggaggacctgggaggagttggaggaagagaaagactatgatcaaaatatactgtctgaaaatcaagaagtgttttaacatggtgaattaacaaagaaagtggtgctggtgcacccctgtctggtttagagttgcagaatatctttcagccgctccataaactgtactttcaataggctggtaggggggctggcttatttcagggctgtgtgtctttagatgtaaattagcaacaacagtcttaaagttgtgggttcccacatacttcttccaggtgcccttgggtatcccagtgaattcacagggaagctctgagctattgcagttttcttcttttgaagcacacaaaaatacctgggttctgtcagccaccaactactggcttaaggtggttcatagttccagtgtgagatcatagcacattcctttcagtgatgtcacagctttcctaagttaagccttggggatttgctgtactaaaaaacccagtaccatgtttgatttttttcatgttgttgttttgttttttaatgtggaacaggaaatacggtgccggaatctaaccgaaatcctatctctgagaagcggtgtggtatccaggagtatcatagcctataaaattgtgcttatttaagagtgaattaaaactttactattttatcttgtttttccatgtggctaccaaattgttgggacataaacatttattaaatgatttggttctgaatacttaacacatggaattgttggtattttccatgccttagatgtgctagagtacatttacagagactccattgtgtataatagagaaaatttgcagacctctgatgtagctccttggggccctgagaagaaaagagaaagatgggactcacaattcgatccagtttgagctacctgctgcctgctgtctctctgctccttgccactcagccctcattgacgtactactgtgagtgattggtgattgagtgaattagcaaaaataacatctgtctatgggtaatacggtttctgtcaaatgagtattcttctgaggtagcctccatgtcccagcagccactcccaggaatgaatggcaggtgttacctactgcctccgccagcagttacagggctttctgtctccccttccctccagcacacaccatagttccaggataggatccctctatctagactgtctagttcagatacaaggttaaggagataggcaggaatatttcatgtccttagttcatttgtgtttggttgtttggacacattctccccatgaggatggggagaatgtgtcctgagtgcgagatgactgaatcacatgagagctttgagaacatggctgtctatgccataaggacctctcatattgcttagaaagtgttccttggcaacaacactatgggatacaccgcttgctatgtattgtgtttggcccttaaaaaggtaaagaggtttgtgtctgttactggataacaaaatgagagagtgagatgacccgtttttctgggcttgaggagggtcatgtggtcatatgtttctctgaacttggaattacacttaaagtggaggctgtgactacgacagagatgggaggcaggggagtggttgagccacatagcgtgtcttcattggagtgcttagaggtattctgcaagccccgagagcctgtgcagtctctcgtgttctgaattgccattcttggttcctgggggcgtcagctttctcagtttgtcttcagtcttgctctgggccatgtgcatctggctggttcttttgccagcagccactgcttttcacctctcgccccgtcttaacctctccttgtcaccatcctctctgatttctatttctgattaccttctttaaatctcagtttccctttctccccactctctctatccctgcacccccacccttggtacttccatcatggcagtggaacagaaaagtaaaagtccagagattgactctagggttcaagcttcaagctgaagatcaaaaacacaaagcagccggccactagctcttacctctacctcagagcaaaagggctgtcctgtcctccgcttggctagagagtaaatctcacgaggctcctttccttttccttttatacttccctagtgctgggattaaaggcgtgtgattccaagtgctgagatcacctttgtgtgagctgtttctcttttaggactgatcaattttgtgtagctcagtgtggccttgaactcacagagaaccatctttcctttgtctcctgagtcctcggattaaaggtgtgtgccaccactgcctagattctatagctaactagtgtggctggtgggattaaagttatgaatcaccattgcctggccctattacttgtggctggctttgctttctgtacccccaggtaagctttaataaatcataaataatatatcaccacatatcataattctcaagttccacatcctactttgtccaaagtcacagacaattggggacattgacccccctgagacctaagtgatacatcaaagctttgtagtagttttgtgttgagctcataaatagggttctggtggtctgtgtggatgaattttatcatgagttaattaatcaggacttattgcctcaatccatttttcagaatgccatagaagtttcaattggcttgtacatgctgatgatgtcgtatttgagtacctttgcctatagccatgttcaagggtgtggctgtaatctctgcagcagtactgatctgtggaagtgtgagggcctcacataatttaatatattagtagatgtattgagcttaagacattactgttgcttagtagctacatgtattggtggctgctatgctaaacagtacagcttcaagttgcaagatcatagatccttcgtgccattaatgacctgaaaatatcccttgaacatagtgttcataggatgacgagtgaggtgcaggtgtagttcgttgttttactctttactctttactctttttggggcctgccacccagcacccaaataatcacacatggagactttttcttgcttatgaatgccctgccttagcttggcttgttgctagttagcttttcttaacttaaattatgccatataccttattctatttctatatatcttttctttacttcttatgcgttgtctggctatgtgtctggcccctggagtcccccttctcctcctcctttagctttagtgatatattatttatgatttattaaagcttgcctgaagttcagaaaagcaaagcagctggccgataacttcttacctctaactcaggctgaatgggctgatcctgtctcaggagctctcaccaagcctcagactgtaacctctcctcattgaggctggagaagaatgcctctccgagaccttacttctgttttatatacttcactaatgttgggattaaaggtgtgactcacagagatctgtctacttcttaatcctgcatcctaggattaaaggtgtgtaccaccatctcttagcttctggctgctggggttaaaggtgtttgcctggtttctaaggcttgtggctaactttgcttttctgaatctttagtcaagctgtaataatcataaataatacatcactacatttagctcttagacctcctctcccagatttctcctattgtttattctctctgcttgctgtccccacctattctttctcctgtctagctctttattagaccaatcaggtgttttagacaggcaaagtagcacagattcacagagttaaagcaagtgcaacataaaagaatgccacacacttttgcaccattaaacatgttccacagcataaacaaatgtaataatcttaaaataatattctacaacacacaggagcttgatgaggaagttgggcttggggatcccttaaagttcaatgccagccttgagataacttttgtcaaacagctgagggatatggagcatggcctacaggacagaaatcttggagtcactgctattcctcccatgcaaactcccaattcccttctcgcccctctcaattttcatttcccattcttaagtctctcctcttcttggtgggctaaaatttacacaaattttgcctaccattgctgggaagagtaattcagcaattaatagttaaaataaattcttcaaattatggagacctattttcccttttttttttttacctagtttatccagcaaagaagaaggttaactttatttttgaaattacgaaataatatcttatcccagaaagtctcaaaagctagaaaatcaaattcaagtttgcatgtcccagtgatagaagttgctgtccaccctatcctgatttccaccccaccccatctgtgaggtgaagtgagtttggacaggccctgtttcctttaacttagctaagtattgtcttatgttctcagggttacttttgtataacaccatcaaacaaataaaccaccccctccacccacttatctttggtctgagtctcccttcagaatgaaggaaaagtatggtagaggtcagaatttgttcacagccagggacagagaaaggaaatatgggaagctttaattcccctcctgtttggtcttcccactactgactcctgtttttttctcctttgaaaaggggagcagcaatttggtgaatctttcaatgttttccatgaggagctgtctccatggtcagggaactgcagactcctggtctgcaaccaactctttccaaaatgaaatgagtgtttgaggtctaactcagtgaaatcaaggttcccagtcttgcagatgacttcggacactgctcttctgttctcttttcacagactgacagatgtaagtgctgggtcttcactgatgttagaagtacctgggaggttggttgagaggggcaggtagagatggcacacccacagggtccattgaagcttgccacagagactgcttgctggttaactcctggggctgcttggctgtagtaaatccgaaggactgtttggaatcaggattggaacagttcagaggttaagtgactcccatgcattaggaatgtggaatgtggaatgtcgcttgggtcaaaaagaaaggaaaagaatgaaagtaatgtcatcctgtacttttgtttccaaatagcttcagattatcagctatgttaatcatacaataaacatatttagtggggagtgagctcgtcattgctgtgttctcttgatttagtttcttggtttatgatctgtgctttctctgccttgctcatactgtatggggaatggtagtaccattacttatcctttatacttaaaacctttgtttagttctcatagagttgtcttcagctcccaaacaatgctaaattatactgatggtaggactcagttttgttcctaattctaagaaagttgttggtgccggagttattaatgcccttttgggtctgagggtaggtttcagcgaaagttcaagagtttaatgccttcacaagcacatttgatttggtaagataggtaggtaggtgttaatgtctacaaatgtttgtgtatacatgtatacataacaacattttacatgttatatcattacactcacaactattctttttctgtagttatatacataatacactatattataattaaatttataattttaataatgtaaataatatatttactcctctgtactctttcctgggagatgactatctttgagttatctttccctttctttgtaaagagctgtccttaaatctctgaagatatgcccccttaaagcagctgctttgggattgactgttatgccagcagagggaaacagtgattcaggggaaacagacagccctgaggtttaaaccttggggagacctgaggttcttgaatggcagtgggaggctgttgtcctatgttctgaggcacacaggagtcaggcagacaagggaaggagcactgagcagagatagtcaggaccttgggaacccaagagtgtttagaaacctctggctgagcagtggagccgatggactagagttgaactgctctcacaaatgtgttctgtaagttaattcaaacacacacaggcttgtttggttagggtaaagctggcattacatcctttggtgccagtgtttggatccgtggtgtgaagagacagggagtaaatgtctgtcactggacagccttcaggaaacccatgaagcagttcacagtttatgtcaggagttaaaagggactgaactcaaggagtctgtttaagatctccaaaaagggtctataacaggttgcatgaagttttgtcttgggaaatgacagaagatgaagatgaaaccagctttgactttagccttaccaggttttgtgggggtaggtgccttcagtgggtgtcatgggggtccctgttttggcagaggatcctgtagtggtgggctgtgctttaggaaggatttacttatggcctaagatgattggagatatcagaaatcctgaagcaaccaaaagtagcacttagaaaaaaatgcatataaattgtagccattagaatcaccagtagaatggtgaaaggcttcctttagcccccaagatgctaattcttttggcttcttgggaaccatagctcattcctttctgtagtgagagactgacttgttgtatactgttttgtgtgtagaagcattcaatactggccagcaaagccttagccatttaaagaaggatttattgcttcttatgctgactcatgtatgaaatcgtcctactcgaaaaggggtgtttccttatgtggcagacagggaaagtaggaaacgcagccaataattactttttcctgattgttctttctggtagtttgctaagtcaaactggaaagggaaaaataaatgctagagcaaggaacagcagataggagagtgaccgaaacctgcgagcgttgttaacaggggttgtgataggataaatactgtattcaggcttgcctgcgtcagtcccagcaccctgtgacatactcacagtgtctcaggctttcagcaagcaaggtgggcactgatagcatcacacagaccttaagtacggtgggtgcttggaggaaacagagtagggaaggtgtgggctttggagtttttctggcaagagcccatttattgtcagagtactagccactggcaaagcctatgggtttggaaatacctaatgagagcccatggtctccagtgactcatggtctgatgtgacaaaagactaggttatgaagctgagccatacattggagtcttcaaactgcaaactgctgtgttggcagagtaaaaggctgttgaagaagagacatggttggaagagtgtttaataaggccaggttggctgctagcaaccatcatgcattttaggaaaaacaataccttgtgtgtatatgggttgcatttagggttaatcagtttcaaaacagtgaaatttatctttgtgccactggaggtttagagtttctagtttattgtttatttctatctttttctatgtattcatcttgttattcattcagtttggataaaaatagtatttagcatccaccattacatacttatatgcatatcgctcctttttcatggtccaagatacccttgtatcagtcttggttcctgtaaacatgccatgaagtgaggaaggggatgtgatggttcccgttacctacattgaatgtgatgaattgaattgatgtcccgttattgacatttaaccttagaaaggttaaaaattggtaaatggtaagttggcctcagagactggatcttatggtcactcagacatgtgtctgtgggtaaaacccttgatcttaagaactgagggaccacagctatgtcttctgtgggtcaggcaaaactcttttttttttttttttcaggaatccctctacactatctggcttttaataaaactgctcagattattaaaataaatgattcagtgggtagaattataaagctgcataacatacatcaagcatgttacagcaacttaaaaggtctaaatacatatttatttcccagtcttttgatgtaggcccaacatcctttctctgattgagggtcttcctggagttcacttctatcatctgtaatgcataactcttgtaaaatattgatttctttaatatggaatgggaacttaaaagtatttgtgaagcgatattgagtgtagaatcattttgggtttaaaaaatcctcctctaagatcttgcacaaatacctacaccatatctaatttagcaacagtgttctagaaccatcttaatctgaaaacaaaacatttccaaggtagttttcataggaaaaaagctatcttcttttcctgttccctttatgtaatatttaattaaattatgtaaatactaacagcacacaactgtcacaagcatggcttgtcataaacaggtttgggaacaagcagtgactcttgataaatatccatctgcgttgatgggagctaactcacactggcatattggagagcagtgtcctagctgtgcgtgatacgtgtcacgagcaactgccagtgtcttttccacagggaacatcaattaacactggcgattcagctaaaacagattcaattgcatatgaagcaaaggaaggcttataccactatagaaacccagagggtgtgtatgcggggagccgggagaggccatatgtcctcagcaaagggaagaggaccatctcatgaccaggatgacgtgggagagtctggtagacactctattcaaaattcttttctctggtttgcttcataaaacaaacttccgcacaccaggtaggttaagagaggattttgttgacttcctaatgcaaaatcattctggtagctggagatttagaaatttaatcttccacccttggtgtggagccctatctatcctgggcaggtgtatgtaagccctgccttaactccatcagattaacttcagtgatttgcttggatgccctgaccttctgcactaactctcacagagttgaaaatgtctcagccttgctccagtatattggctgggtcataccaaaggagtatattttcaaacacattttttctaaccctactaaatagaaaaagagaaattaaaaatgatggagccaagcccaatggtagtggtggtggcggcatatacacctttaatcctagaacttgggaggtagaggcaggcagatctcagtgagtttgaggccaccctggtctacagagtgagttccaggacagcaacaactactacacagagaaaacctgtctcaaaaaaacaataaacaaacaaacaaacaaacaaataaataaataaatattcaaagtgatggatccatctccatttgtaattttcaaattaaccataatggtgctagtaatgagttgactaaatagctatccatacctgcattagtcctgtatgtttatgtatgtgtgtgcataagtggttattacatacagggtgaaataatagtgtatacctacaaaagcacatacagacaccatagttttcatagatggaagatgctaatgcctgatgtggtgatgagcttccataagtactctcatatcttgaaaaataaaagtgttgaggccctgagtgttctgacttaaggacagttgagtttttgataaccttaatcacttttgagccatcctcttgggttacttcctctttcttcttcctggtctaccacaggccagacaggatctgatcttgatatgagcttgctaggtttgttaataaaaatggattaagacaagtgcaatagctaggtgatagtggcacacacctgtagtctcaacactcaggaggcagaggcgggtagatggatttctgtgaggttgaggccaacatgatctacagagctagtgccagagcagccagggttacaaaaatccctgtctgggaaaataaaacaaagaaactaccacacacacacacacgcacgcgcgcgtgcgcgcgcgcgcgcgcgcgcgcgcgcgcgagagagagagagagagagagagagagagagagagagagagagagagagagagaacgattatggtattggtcttctttttttaaaagataaggccctatgtgctgtcctggcccggtccctcactggcccctgggatagctggccttgcccctcactggacactgcaacaggaaagctggcctgctccccatgggagagctgcctcccccactctggagagataaccctatccctcaccatgggcctgggagagcagactctgcccctctcagtgaccctgacagaccagctcagctaccaggcagaccctacatccttatttaaatgagcatttctgtgagtggggctgattggacaaaaggctatatacttcatgacacactgcagctcccgacactactaggatgaatgaagaggtgttggaaagatggagaatcaaggtggtttttgttttgtttttagttaattgagggaggaggttaggggctgcttcaggggtgaggggcagatatggaaggactgggaggtgattgggattggggtacatgatgtgaaattcccaaaagaatcaataaagaactgccgttcttatttataaagaaaaggagatagagagaaagccctaatgactcaagtcagatttttttaatgtggggccaggtggttgtagggttaatcatggtaatttgtctagaattcattatgcaaatgaaggctggctgttctttagccatgactcatctagaagagtgctgttcagtagaaacaatgtaagtcacacatagggactgcataagtaattaaaacaattttagtggccacattaaaaagtacaattgcagttaattttaatgaagttaattttaacatagtgtatctgaaatcctatttctgtatgtaatctaacataaattactaacatctatagtgagatttattcttctgtgtgcttaagtcttctcaacctggtgtgttgtttatgaagcattacgtgttcagaatagccacatttcaggtaccccagtggctacacagggttagtagctgccctactggataagcaagtgctgctgtgttatgttccatggtgaggacggggaacatttctctttggtcttgcaccacaccacttggtcctggagcctccatctgtcagagctcttgtatggtatgcaatggctatgcccaacagccagctggcatcagtgctttggaggggggtgtgggtctttggtatgttgctgtgtgtttaatttcacctcagagggagcagatggattcctatggagcttgaataaagatgattgttcctcagaaagagccttgttgagcaacaagtataggatttcttggatgatagccaagcctgagcaggttttctatagcgtgcttggcacacattttccccacttcctggagatgccctctagttaaaaggtgaaaacagcctgctgttgcatagggaactgcaaaagacaacatgttgctgaaactgagcatgttggaagccctttgacaaggaccaggatgggtcagggagtgtctccatcaacacacccattttcccgtagtgttcaagctgcaggacacccctgtaaactcctgtcatggctgagggaccccaaagcacagatatacatggtacagttctattccaagatgtgggaagaagacggcgctatcgtttctgtattaaaatgaatgcagctgttgggtgcatgactatgactcaaacccctaaagtgtttgagagctcagagcatgcgccttgggccacagcttgagcttgagtgaatttgctttgagtttaatgcaacttcacttttcagattgtgcacacagggtcttaattataagggtgcattatccagggaggaacaatgtgtttgaaatgaatgttttggaagaaaaggaaaacaaatatgtgcaaagattagtttcagtaggaatttagtttacagaaaaacgtgtacacagatatgcatatatacacatttttttcttcaagctagcaaggttccttctccctttttgtatcatttgcttctacctgaacatctttttcctcctccccatacccacccctctccccttcttttaactggaattgaatgaacagtgctatgctactaggatacttgttattcatgttataattgtaaactatttttaatttttttaacttttttgctttcatctgattttaaaatcaatgtagactgagtataagatgaagataaaattatctattactctcaaggagcttataatcttgcttatgattattgtggggttttcaggggtgaaatttaggaaaagaggattgaaagtttacgttagcagatgagttcatggtaactgtgcccactgtgcataaactagaatttctgtttatccttcaaatgaagttgttaaataatataagattaaatggcttctgcaataatttaacatgaaaatattctgatacctgggaaaccagcataggactgatccagatcccctgaatatgggtgtcagtgaggagaccttgggaatctatggggcctcttgtagtgggtcagttcttacccctagcataggaatggactttgggagcctatcctacctggagggatactccctgagcctagaaacaagggggttggcctaggccctatcccaaagaatgacagacattgaagatccccctatggaaggcctcacacttcctgggtagcagaaagggtatgggataggtagggtgttagttgtgggggcaggggatgaggggagggaaagggacctgggattgacatgtaaaataattttctttctaattaaaaaaatccaaaaaagaaaaaattcttgaagttgggaaaataagttactggatataaagtaatgcagatgcatgagacagagattgtaaagggttaaaaggcctaatggatttgaggaaacacatgtgtcactcagcaacactcctgaaacacagaacccagggtagataacaccttttgaacctactacagtgcttacttagattaaaaaacaatactttcaattgtcttttttttaacgtgtatggttgttttgactgcatgtatgtctgtgaaccatgtgcatatgttgtacttttcctggggaaatgaagcacacttgtctacccaccccagatatggaacctacgacagactaaaatatgaataccaccaaagtcaaaattggcgaaccggtgagttttattggggttgcgtataggagcagaaatgactccaagacagctgggtcaccaaagcccatcccagaatgggagacagcttacaaaagctgggaacctggagcacactgcacagcctgcaggcgcttggagagtgtcctttccaggttggcttaagtctcttccaggcagttctgctggtttctgcttcttccaggcagctcttatctctgagtcttctttgcagctggccagggagcagcctagtgaatctactcagtttcagggagttcttgaagctttttttaaaaaaattgtttatttccctgcttatggggctccatgcaggatggaatgttttaatcttggaggagacttacacaacttcatgtctggtgcccagggagtccaaaagggatgtcagatcccctggaactggagttatagatgagctgccatatggatgctgggagtcacacctgagtcatgtggaaaagcaggcactgttcttaaccgctgaaccatttctccagctcctgaaagtacttgtaaaattagctgtggatgtattcaaatggaaacatttttgatagcctagatataacttaataaagggaaagaagtagataatggaaaaataagctaggaatctttgactcactttttcaggaaggcttctcttggcagggtggcagacaagatgttgtgtttaagagggtagaagacacagtttgcatctccacacactctgttatacccagctaaagggaccctggagaaagcagctcttagctggcctgattttattttactttatttgtgtgtgtactggtagttctaggcagatttcaggaaggaaggtagaatgttggtggtgattagtaaattctccctgtggcaagacctctcattctccattccaaaggagttatgctgacatgcacttccctcttcctatgaaagtaatgggcgacttccttctgtctgttctgggcaggggagatgccacatgggtctttaggaacctctgttctctccgagtctgctgctctttagtcacaacccagtgaaggaaggagtggttccccaggcttgcttctgccactgtgcttggtggtaaagaaagacacatggcagtgtggtaacaggaaattcctggagaatttttttcccccagaacattcttaggttgaaaccctgaggaagggattctggacaacctttggtcaaaggtagaataaagggaacatgcctgcccatgtgacacatgaattaaccaaggatagggaagctacttaaaaacataccaaactgaagaaagtgctgaagaagcagaggagtaggagtgagaaaataccttcccagtgtttcaaaaaatcaggaagggagaaatgaacacatcagtagtcatactcttatttaaattctagaaaaacagtgggaaaacagtccagaaacaaagtatgtgtctttttaatgatgtaagacaaggtgtcagacccaatccagatttttaaaactacatttacagaattggggggtataaagatgatagccttagataatgaaaacataccactaaaatagctagacttgtggcttaaaaagtaattaatctcaaatgataaaaataccatttgtagggttttcagccgtgacttgggctcatcaggctaagccaactggaaattttctcttactccaaatgtgtaggattttttcttttaactgtacatccgtctgtctgtagtcccattgaagtcttagcttctgcaatctgatttactgattgtgagggtgccatgcatgttggttattggtgcttcccattgtcatttgttttcatactgtttcacctggagactttacccgaccctggctggtatggatatatctaagttagttcaacgtgtagctttgctgttttggataatgtgccgtgagcatctttgacaagtaacttttcctcttagtttggatgatttctttaataatgtttttaagcaggataagtgaaggcgatgagcatgtgagtggctctgtcctcagtgtcacattgctctctgagacatttctgcggtgtccacatgtggattgtagagtgtgtgttgtggtcacgtggcctgctgctgctgcacagggttcccttggcttggttcgctggaggcagttctcacacgaggtgaggctgagacaccgccaagggaatcctgagcttaaaatacttttcacaattgctatggagaagaaaaaaaaagaactctatcatcagaagatgtaggtagctgtcattgcagggccttgttttctcaagttcctcttgccttctggaatgttaggggcctgaaaacttagggagtaagggaatttgcataaatcgaatcttgtcaagatgccttctacatagttggggctccacaccatttgtgagtaattaaatgctgtggagaagttgttgacagtcaccttggagcgaatgccttttggtctgtggtggcaattagactgctatgtgtgacagacagctttagatactttccaccctagaatggggtttgtgtctacagttcactgttacagccaatgtttgcaaatactgtaacaaaaaactgttccaacataaaaaccaatattcagtctgtcacatcccagcccatgtggaaagggaaatactttttagaagtggtgatttttaataatataagctgtttggagcaggggctatttaaaagctcacagcttgggtaaatgaaggagacatactgatggaagccacaaacatgcttagtgcatgagatcaccagtctcattctcaccttcaaaacaaatggctttccctcctctctagctgtttttttttttttttttttttttttaaatactgtatctcctcccccccccccactttgacaaccacatcaagttttcctggctttgggcaggagcagttctccaactgttaagccgtgtgagaacagtgaacttggtcagtaaggatcatttgtgttcagctgtcaacaaaggcttgttttactaggaacaatgactatgcaggtttgtgcagagtgttgtgtgcagtggtgttaatcagtaagcagcttgagccatacccacagtcccttccacatagttattttactcttttgggtgactgtttttcctgcccattggcagcgtctgaaaaacacactcatcagtatgcagggatgcactctgcagagagagcctgaacccgtcctgtttccttctgctggtctctcattgctcctcactagtgtgccgcctattattattggtgtttaagaacagtgattaaatgacaatgatgtaggtctaaggtcaagatgaaagatgtttcttaggtttggaaacacacaggcagccttgcattcacgtacctactcacacttgcacagaagacatggccattgggaaggccctagtctagagtccgaggactaagttagcagtgagtgaattattctgctcagtttgacagagtattctcttccgcaaccagaaggactgaattgccagaagagacactgagcataatctgtggcatggctaaatgatattaagttgttagaaacttcaagatgatagttgggatccccttctagtcctgatgagtggcacccacataaaccctccctgtgtttgaagcctccctgccagctttaccaaccccgtaatacccacccccacatttgtgtatgtgcctttcactgaacctagagctcttggttttggctagactaggtggccagcaggtcttcatgatctggttgtttccacagttcccccacaagtacttggtttagagagatgcatggccatgcccagctttcatgtgggttcttgggatccaaatccaggtccccatggttgtgcagcaggctctttatccacccagtcatatccccggccccttacgccattttcagtgagccacgtaggcgcagtgttcatgcttgaagcaggtggatttatgccattggatacatgaaatgatacctttttgcatgctcttggctctacatatgtgtggagagagtgaagagcctggcttatgagttccaaagacacataaagatcttctttatttttgatcgtgagcatagttgatggctgagccatcttttcagcccataaatgttctgaatagtacagtgactttgagaaagtcatgtgagctctcagtgttaccaacatacatatgagtaatgggttgaaattataatagtttaacactaactgactgagtttgttgtctcatacaagcctcactgcaatgcggtgaagtgcctcctgctgtatcctggcttgaaaatgagaatccagacaggtcaaacattttttcttgagttctggagaaatgactcagcagttaagagtggctgctcttcagaggacctgtgtccaattcacagcacctacatggcaactcacaactggctgtaactccaattccaggggacaccctcacacagacaaatgtgcacataaaatacaaataaataactaaatgaaatattaaagaaaggtcttcttgaaggtgacttggctagtatgtggctgtcagaggactgaacctcttgaggcacactgagccacctttatcatcttgcgtcttcctggcatgatgcctgtataccaggatctctgcttccaaaggaatgaatagatgagattggaagaaaaggctgaccaagagctttacaaattctgaattaccttgtgtgtctgatttcggttgattggggaacataggtacagcatagacctatgggaatctacttcctgactgttccttggtgaaagtagtttgtagcaagtggtttagatacagtaagaaatgggaaggaaaaccaagattgatgcacctcatagaagcaccacgagtataatgaaaccagtgacaacatggggtaactgtgtgaaaggggactgagttactttggtcagaggcttttcaacccgaagtccaagatgcaaggatttgtgcagctgaaccctaacagagccaccacatcttggagcaggaaatgtggaaatgatccttggactattccacctgctttacatcattgtcctgggatttctggagagatagaaggaagttctagaacagtggttctcacctttcctaatgcttcgacagttcctcatgctgtggtgaccccaaccataaaattatttttgttgttacttcataactgtaattttgctattgttatgagtcatgatgtaaatattttatatgcagaatggtcctacgccactcctgtgaaagggtcctttaaccctcagagggcttctgacccacagattgagaaccaccgttctatatccttgtaattgacaagtgttggatggtgctggagcaggctcaagaggagttggttctggtaaagagtccctctcttttgaagaatgcttggtgagttcctaaagtgggggtttctatggagacaatggcttgttataattttaggtgatggactcccaaacctaagagaagtgaagtttatgagttgaaggtaactttgcttaattatggtttctctcacacaatggtcatcagggaatcctctcatctgctgtttgaagactgaagactataggagtctttctctctgaaaaacagtgtagcatgtgtgttcaggtcattgcttctaaatatatgtaaattgtcgtagagctcatcatcttcgttgatacaagcaatactgtcctgtggctttggtggtgatcctgggagtggagtagttaacagtattctgtaatagacaaaaaactcctagatataaaaatattttcaacttgattcatactcaagtattccagtattaatgatctcttctttgggatggccaaggttccctggctaattttatcaccttagtgttaaagatttaaatatgacttagtaaatgtcaatgttagaaggacgataaaagaataagaattacattttcctgatgtaaaattttttagatttatttattttattttactattttatgtgtatgagtggtgtgtgtgtgtgtgtgtgtgtgtgtgtgtgtgtgtgtgtgtgtgtgtgtgatgcatgtgcctggtgcttgaggaggtcagaagagggtgccagacccggtgaactgaagttacaaactgctgggagcctctatgtgctgggaattaaactcaagtccactgtaagagcgacaagaactcttaacccctgagccaactctccagcccctgtttcctaattttagatgcttcttgtgttcctccaacattttcatctttaatgtaagcacttcttgaggcagatttttatgatagtggtactatttgcagtaaatggtggattttgatggtagtggcacttttttttgcagtagatagatttttgaaggttgtagccctgttttgaagtaaaatgcctgttgtatagtatagtatttagaaaatttctcacatagtatccctcaaattactgttagaggttatctatatttaaaaataaaacattgaaattcagtgttacccttctcagaagtcacctagtatatgaacagcacagcaaggataggaacttaggaagtgtaatgctggaagcagtttacttcgtggttatcatgaaatacatttcacttacctgcaagacttggacaggttgagatattcatcatttccttaggaatagggaagcaggcttatgaagccccaccgctccctgaagagctttttgatagttaatgattgattgcaggggtgtgtcattttcttcagtggtgtaaccaccccttagttgcccatgttctagtagctagcccctcactcatgctcattaaaacactgataaagttagtagttacatagaagatcagaaggtaggaagaggaactaattgtgagaaagagggttaacaggaatagggaggggtaagctgtggtggtggaggggttaatatgaccatagcatatggtgtacatgtatgaaactgtaaaaataaaaagagagaaaaagtaattttttgtgtgttgtaaaatgttgagttaaataagtttattgaaatcttatataaaaaacaaaagtttaaatagattaatgctctagatttctggtaacttaggcaaggcattgtttatgtaaattgcccaccatggacccaagtgttgtcccaggacttcaaacaggcatgtgaagtaccccttttaatagactttcttaagagtgttagtgagttataaaaatcctagtcctttgagaagatgtggtagatcaacatttgtaatcacaggatgtgaatgcctggggtaggagaatagccctaagtttcaggtcatcctgagctatctctagccagggatatagtgtaaggctttgtttcagacaaaacaaaataaaagacaccaaccaaccaaaaattgaaaaaagcatcagagcaaagcaaactaaagaaaaagaaacaaaaattttgaattttttaaaaaaatttaagtctgaaaacatgtgtattttgccttaatgattctatgctactttagttgggcataaaactgttgattgacagttgctttctttaagactttgaatgtattgtgtggtgttagctttgcttcttgcttttaaaggttaaccatctaaccagtcctcgtgagagtttccctgatcctgatgcttttctgtttcatctcagtggatctaggtgtgagtttgtattctgtttctgttcattttcaatctaagaacatgtaattcactccacttcctaatggaataatttcatgtatatcagagccttttaatccatctgtcacgtttctcagttgaactttaatttcaaagaagagtgtacttgcctctgcatccttcagggtaaagagatctacaaagtctccaaagcaatgcctttaaattcattattctttttgcatgccttgggtttttataactaattttaactcctttactgagtttttctagtacaactcatgatattcatctgtcctaagattttaattgttacccattattctgtcttttttgttttcataaatccatgcttaaaatggatgtttcactcaactcatctaatatttctaagtatatttagagttttgtctgagtattctaagaaaataatttcatttgggctgaattcataacttgatggttgatttgactttcttagaattagattcttttgtgttttggaattttagtttgtgagctcattttggatgtgagggaattttacttgttttgttcttttattcttcttcttagactattgcttttgtggtttttttactattgctttcacctgcctctctgggctgagcagaaaattaggtattgtaatggagttaacatttagtttctgttctggactgttttgagggatatagtatgtattcatggagcaggctggcaacatggctgagtttctagggtcacaggtactcaacctggagcttcaactcccattgtttcctgtagcttcctttacagataggtggggggttagtctttgcttgttagtccttattagtccttattaactagtgcttgcttaagtagcaagaggaactgcttatcatgaggcatttaggattcttgtctctcttagaagtccagtacattgcaacttctgctttcttctggcttgaggacgaccttgtttgttttttgtccccagccccatttatgagttttctctccttcctccttctcctcctcctttctctttttgagtttgtattgccttggatactgacagaacttgattgggtttgtttttaaaatgaaacagttcaaatgtaaactgttgtgttggaccagagtaattgttctctagcttccttggcctgcccacaccatcttctcccttcctcgggaactctgagatgctttcttccttcgctcgcagaactgcttcagaaattaagggatttactttcttcctggtgttaccttgattgggcaatattcagaataaatttcagagctccaccttcagtgtaaatgtcagtattatcttaagttaaggagaaagatattaagaagtaagtttacagaaattattctcatgaaccaatattcaggagatgtgacatttgatatgatgtgtactcaagtataaacttcttctcagttctcatgtatgttgttatgaaatagctgaaaagcttcatgagttgttagagccttccttcttccttattcttttaaaatcagaaataataaaaactttataaaagcttttaggaaagcaaatgttaatacggaaatgtctttatctttttcatatcttaataaacctgaagggaatatccatgcttcagggagctttcaaatgtaccttgagtacacattaggttaggagtaacagtgcactgtagaagtttccaggcctccttttaaataaagtctggtgatgaccaacagctccttcctgcctgcccttctagttaagctgtgctctctccttagctctttctctcttggtctgatcagccagacttaagagctgttggcattctgtccttatagcttatagaatattttcagctcagctgttatattaaagatactgctcattttaaattactttgaaaatattctctaaatatgtgaacctggtaacgtttctcctaagaagaaaaggagagtcgggtgaattgagtctcagagtatttttcatttgttcaggctttgtcttaggcaatggccagagttgatctgtttttgagtgttttgtgtgtgtgtgcgtgcatgagtgtgcctgcatgtgtgttcatgtgtgcctgtacatgtgtgcactttagtggaagttgagaatgacctccagtggccacctcctttgaaacagagcccctcattggcctggagttcatcacttaggtcagactggctgagcattggattccatggagcctccagtctctagctcccagcactgggattgcaaacatagggcattttttgtctgggttctgcagatagaacccagttcctcttgtgcaaatactttaccactgatggaactgtctacccagggctttgttctttgcctctctctgtgtcttactctgtctctctctctctctgagacagaattctgccaggtatcccagactagctgtgaacccataatccccctacctcagcttccaggatctgggcttccttgcatgttttctacgacttctgtagatgtatgtgtatatttcctttgttcatagacaatactatgaaccctaacactgttttttttttatatccaacaacttattttgtaactcattcactagaagtccatgcagaactacctcatcatctttctgttcctttcagtaaagaagttaattattgttagattatagttctgaacaaatcatcacacggtagaggccaggcttgctgacacgcttgttttgtgttacagcagagtggaccgttgattcaactctcctagcaggcagagtgtgagccttcatattgagaaaggatctgcagagtttcaggatggaagcttgcccgacagttctgtgttttcaacaataggtggcaccagcaatttctctattggggctgtgtggagatggaaagcctgatcattttgatcatttttcatttcataccgttgtattcatagattattaagagcaaagatgtgtttagctgaaagcctggaggctggcacctgtatgcatatatccatagcagattaagaggcgctctgtagtaaggtacctgtgactcaaagctgtgtctcttcttaccctagcctgtgtttggagcagccacgtagttagagaagccacttagttaagcacagacttaattttcactgcatacaactagaatgtagatggacctttcctgcatttctcttgagattgatgatgttggaaattttgtcttgtgtcacacacatgaattgaccactgcttggagctctgtgtactctgaggatttaacctgtcaaactggcactcactgttttccatctcagtctcagttctaaaccttccccccttgctccctgttgtgtgggcctagaccaccaccaacatttaaaacacagctcttcaaatcaaattcattagccccagagagtacttctttcctttcctttccattgccacctgaaaatttctaatttgcctttgaaaatttgccttcatttctgttccctggcagtacaaggctttgattactgcctaagtaggtgattgtcctaactgttcccgtttttgttctttttaagtatggggagaataattctccagatccagaataaaagaaatctatacatggttctcaacaatgtttccaaagtcaaacatacacagatccctctgaaatggtgaattatgagtattctttatacccaaatagatttggatgcaaacgtcttccgatgtgacatgactctgtacccaccctcaggtccacagagatgttgggaataaggatgtgaagagaacttttgatttgaactggattagcattgccatcccttgaatttcccttcctgaagggaacatgcacacccttggctttcacctggcattatgccttgagttcatcccatggttttacctgtggatttctgttttcacagaaacttttgctcctatagcagtccctagtagttttgctgttgatcattgtgcagacctttgattcttcctttgtgccccaagtacctggctcttagaattactaactccttcaagaatcaagccacttttttagtcagtggtaagaagcttgcaaacacaaacatcacagcttatgtaggaaatcatgagtgtgtgtgtgtgtgtgtgtgtgtgtgtgtgtgtgtgtgtgtgtgtgtgtgttctgcatgcatgcatgtgtgtggggggagagagtgcttgggtagagatcagaggacgaccttgagtgttgatccccatcttcaatcttgtctgagacagtctttctggtggttcattgcttcttagcccagcacagttggtctgcatacctccagtgattttctgctgtcttgctcacatctcctcataaggacactgggatttcagatacccacactactacatccagctttcccatgggttcttaggatctgaactcaagtcattgggcgtgtgcagtacttttactgagtgatctcccccgttcccagaattatgagtattctttatacccaaagctataaagcagctctgcagttcaagctagctttgaactcattatgtagcccaagctaggcttgaactcatgacacctctcctggttcagaaacccaaggcctgagattaccagcttggggaaacacatctggtcttgtcccatgttttatgctgtgttaggacagggctgcagttgtacctactacaggccacggagtcctgtagtttttggttcttgttgtagtttgaatgagaaatgcccctcataggctcaagtatttggacactgtttggagaggtttgggagatgtggccttgctggaagaaggccttccctgagctcaggtttttataaccttaccctagttcctgttctttctggttgtggttgaggatgtgatcttatagcttcttgctctgtctttcatgcctgtttgcttccatgcttctcccaacaatggacttaacccctggcaccgaaagcctgcataaatctgtattcctgtaaattgtcttgctcatggtgtattatcatagcaaccgaaaaaaatgactcatacatctcgataccttgagtagttcctctaattttccattcaagatcatcattatttagatttaacttttcaaaatgcagcacgaaataatccagatccatctttgggagtctggcagattcagccatatttttttctggggctgagttggaaagcctgtctcagcaaggcttacttaactattagaaggtggaaggggaaagggggtgttcggccaggccgccagctgctggtgacaaggaagggaaactacagtgcttccttctgcaccacaccctatcagcaagcagagggaccatctgctgtgacacccttctcaacctgaccctgtaccagtcattctacttgcttgctgcagcttggacttccaaggatctgcccaatctctcctgcaaatctcatttgtgtacatggctgggaatctgcacattcctcaaggatgaatcattcagattccctgtagaaccagaggggttaatttttctaggaatcgatgtcacaccaatcagctagggtgaagtctcataaacccatctttccatacctaatactggacaggttgttcttgtgaaatttttttcccaagcaatcatatatgctgtgagttcatgtgcacctaatgaggccactgtatgagccgtagttgcctatcctttgactttgtggtcttcatcaataactctaggtaagtcttgccactcttgctctgttttacaccagaggaaatgaagatttaggaatgttaagtagtttgctgaaggttgcacaggtgagaagtggcaggctgaggagaactggcccttctcttcatactctgctgtcttcaaactttgaaatattgctctaaagcttcacttcagaagggagcatgaccccatgtaactccctcatctagacccctgcttagcattgtaggaccagctcttctctcttcggtgtcgatggagtgtttctgagaggcagttccagcctggcaaagcatccttcagtcctctctggggaaagagctgatgtttctgtgcctatgttttataagttttctttgctgtttatgtagtcagcatgtgttttttgtagtgattatgtgctgaacactgggtagaaagttgttcaaaaggcatacgtggacttatcatcctagaattttacagactgcaagctaaatgtaaataagaaaaatattaactgagacgaagacttgattatttctgttcattgttatcaagatattggaaaacagaattaacttgagtatttactggaaagcatgttgaaaaaagacattcatatgactatactgtctcatgggtagggattagtaattcaaaccagtaaatgtttgaaattgattaaaggaaaatattcagattcttgaataatgatttaaatatgctggaacctaatatccacatagtagatgttttaaattctggccaatgttgaaaggacaacttaaggtaggtgacactaacgagtattattgcagccacagaatgttgaggtaggaaatttgtgggtttctttgccctccctgctcctttctcattttccatgaagaaattaagactcagagaaatggcgtatgaaggctcttccctgtcctcaatccatgactcgtaggatgaataagctggtttatgcagggtctcaagagttcaagttgtcaacatttcaccctctcatatattagcaatgtcaatgacttgaaaataaatgtgatttgagcttcatagttccttcccttagatgtggctggagggctgtgagctcatcgtgaagaagcagtcagatcttctcttgagcctgccttgtgaatttcattctctactactaaatgatctcactagagccagtgactcaagaggcaggttttctctgtgtgaccactttaggggaccacattaaagtgcctgttctccttgtttgtgcgggaatgagttttcttagtgccatcactggattccaacggaggaaatagattactcatgcatgttctaatgattaaaaacttttccagtgtcttggctgcctagttctcatgtggaggttccattaccaaatggtaattgatacaattctgactagccggctaatattgcttagaaagtcaaggcattgaaatgtttgagtcattggttctagggccagaatatcaaaggataagctatgtgagacaacctttcatagttgtgggagacacactagatttgcaggacctcccccatcttgtctgaataacttaataactttgtcttgtgtacaaggctcttttaacctatctgagccttgtttttctccgctgtgcagaaggtagtcatggcaatgactgctgtaattatctcttatggctgctgagaaaatcaactgagatcacaagtccgagagctcactagcgaaatgctttgtggacctgtgcagtgcagtgccaatgatactcaaatgacaattatgatttaaatcttggctagaattatgtatatgggaatattaaatgggtactttggtgccttcatgtgttagtgtagtgacagttgaaaactgcatgtcattaaaggaatgatctttttacttgcttggcatgaatgtcaataaaggaaagcaacttgaaatcctgcttttgggtttcaaagggttaaacagcagtttcagaatcagtagaagatgagacatgaaacaggtaataagaaaatgggctgactgaagatggggtgaaatagatggtgaggtcagggctcagtgcatctttctgtgaccctcttgtgctggagcctagtcagaactttggttcccagctttgctgcatccagcaatgagggcaagaacagtggccatgtgactcagggtccccgtgaagttgagatagtcaagcaaatctgtaatgagacacagtgatttttttccctcaggcagttctcatgaagaacagcacatggagaaaaacacccagttttccagtgggagaagacagatgttttttgaggcttttgctagtggggttgcaaattatttgtaaattacctgtttgcaaggtatttttccctttgtttttattatgactgaatgtatgctaggattagaagtgctatgaaaacccctggtcccttctgtttcctagttcaaagtactgaaccttagaggcattgaatagaaatcctgggctgcttggtgaatgcgtggatctgaggggaagcggtttgctctgagccagttttgtggaccacaggagcctgcctgttttcaatataaccaccgtttggcactttcagcaagtttctaattgtgaatttagtagtagactatgctgtgtttttgtctgtccatttgctatagaagtgtagaaagctattgaattggatgccatcctccccactttatttgttgtttgttttgtttccactatagaagctactaataagcctacagcattggctgagagatttgtagaaagcagatcttcacacataagacttccagcattcatcacttactgcctactctgcccctttcattaagcatcttcaacacccagaatcagaaaatgtagaaaagcatcaacattttaagcaaatttttttcactttaagcaaatttaaatagcaccaatcctttctttttagataaagatggaatttctaaacattgacttgaagcccatggaaactttagacttgattctgtagcacacttgcttgctcatactccaagaaagtgacttctgatgtaacagttgctcaggaggttcctgtggtgtccaagaccaatttaaacaaactattcatcagtggctaagaataaacaggtggctgagagccagagaacataaaggtgggtttccaaaagaaccagggctcccaaagtctcttggagagagatcagagagaggtttggcctcttgttatttgtctgtgacatcattttgtgttattgaggcacttttaacttggggcagtggatcgtattagatgctaggagaatgagaagtcattcatccattttggttaaataactggttcaaagtggtagaagtcttcagtcttgacaccccaacatggaggcgataagtgggacatgctggctgtggagagatctaacgggcagtacaagtgtgaaattccttttttccagctgtcttttattttcctaatttgtaacattaaaattggtctcagagcagcttcataaatataaaagattggcatttgtgagatggagatatcagagtgataaatactcacgaagtaatctttatatttcccagaaagatcccagccagcctaggaaggagcagtatctaattccctgaggaatgacagtcacaggagtcaatcttgggctgctgaaatgcacacagcagaggcacatccatctgtccttctgctcagcacacaccttgtgagtcaacaagatgcccagtgtggaccactgcctctttctaatcttgctgtcagcactaggtgtcttttctctcaaacacagccgctttctaagatggtttcttcagatataacgcatataccgtgcttgaaaaaactcaggttttccttgctcatagttaaaatacaacaaattaactctggagttggtatttcctagacctgttctggtggtatttcttttcttttcctcttttaaggtagccccattctttgaccttcatatccaaaagctttcctactgagtagtgatctgtgcatgcacttgacattagatgatgactgagagatttggcccctttggaaagttctggcctaaggatgggtctgtttatgtttgttgtgggtgaagaatgttaaatgattcataaaataaaccaccaggtaaacagagggggaaagggtgggcctcttttaagcatctcatttctgtctgtctatttttcagggcatctgatgagtcagtgcaggactttctggaagaactgagtcatgagaaatttgatgcacagaatagttggtagcgggaggaatcctgataggtagaatagccttctgttggtggggattacaatcagaaaaaagaaaggaaggtttttttcttttcacagtgcctagaggagaggctttggctcattatggctgatgtttatgtaccactaaaagctacataaatgtatctgtgcactgaccttgagtagagtaaagggtgttcgggagaggaacctatacgtgacacttgcaacattaatgatctagggacatacagaggcttcttgaggacttatggcaaagctccagctctgccctcccaagaaacacagcagctttccctctttcccaatgtgggtctgtctacaggcagcttacatggcccagtttggtcctcaaagccatgcatgtgttatggagcttgaacttgccagtgggtagcataaactgtctcggatttgtcatacagatgggttacctgtgtccccaaagaattgttgcatgggaaatagagctatggccctgggttcttatctaacatcaaggcaaactgttacttggccctagttatcagctgtctgtgtggggagttttgtttgaattctggggttctttctgagaacctttctagagttctcagagttgccttcagctattgggacttacttatatgtagaattaaagagtttatctgaatagacacatccctgtttcatgtgcttgggccttttctccctttatgggatgaacatacattgctcaactatttctgcccctaaaatttccatgctgtccttgactctgtctcttacatgtaagcatatgttagacaaaggcaggtattagctttttccatcccctgggctggtgattttctctttagacatactttgatagtagaagaaattcgtggaaaaaaattcagatacctgaattaaatgtggacaaatttcaaagcatttgcctctctaattgatctttatattcctgttcatctaatgagaatgggagaaaaatactttccatcttagtcatgggtcttggctacacatgtgttttgcacatgcctgggagttcaagaaaatggaaaataaaagtattattattccctttgcatgtgttacacacacacacacacacacacacacacacacacacacacacacacacacaatgtttttatcttgtaaaataatttcaaatttatagaaaaggtagaaaaataacaaataatccaggtagggtagagcatgcctaaaaacactgcatttaagaggtagaaacaggaggatccacagtttaaggccatcctgagcttcgttttgagtttgaggaaagcctgggctacatggtgtcacacacacttaaaaatacatctccacaaaaatacccaacttataaagattttatatatattcataacccagagtctctgtatataaacattttggcttgatttttgccttcttagtctcccttttttgttcatgagaaatgtcaaggggcttgacctacatgtatgtggctgtgtctcagtcatttgaggacacgtggtagacatgttgatttaatactttgaaacactgcagtgcacattccttgttaaagaaagaaatccctttccattttctttctttgtgtgttctaggatccaccttggagtcctgcatttctctgggctcctttaatcaaggctagctcctcagtgcttttatccccgttagtctttgggggcccagcagcttcgagagcactcattggtgggccactcactttgttagggtcccccctgctgaggcccaggctctgctctatgggcagttataccccagacatgatggttgctcatgctctagacgaggaggcaatgacttgtccagtgttggcgatgtacacttccttcccttggttaagaaacctggggccatatttctccaccatagacttacaaatgttttctgtccattaacttataagtgattaataagctggtaatgcggacatattatagcttatttactattctaaccgtcatcaaacttttacactctgccttcagttgtgcttattttccaattctgtcatttcttataaatttgtcagttttattccaaggtaaaaatgaaatcatattgttgatacatttttactttttaatttgttttctagcatgccataatggttccttgctaacaatatttattttattacttaagaagcattactaacccagtgagcccgttccttagtaaatgaggtcggactcagcagcctttaaactgtgactcgaatgtttgaaaatcagtcacttttcttccacccccgcagaaagcaggtggaacacacaacactgtctgctcacctgacatttgtagacaatctcagagcatcttttggtgaaaacacacaaatgagttttcagagagaaggcaaggagggccaagcacctgagggaggtggggtgtcttggctggaagacttgacatatgcagttggcttgcggtgggaaaagcaaggtggaggcctgttgagtacattgctaattgtagacgttagaacctgggagacagctcacatagcaagggacttagaaaatgagcaaaccaagtcagaatagaagcaggtttcttgttgtctgggtgagaaggtaggtagtgcagactggactagatatggaggtactggtgcgaagtcctgtattttagaacctttgtttacatgcctaggtttgcttgtgtataatgtgcatgatatttaaaaaaaatatttcccagccttcccctgcaagagacaagggacagtgatgatgacctgagtgacaatggctatgcaagcactcagaacttggtttctaaatgccgatgcacatggaaagatctggaactccgtaaaggtagctgattcagggcctaaagcaaggctgtagcagatgaacctagaatagcttactgtattagaacgcaagaaatcatccaacaaacaactggaacattttagaaggacccagtaggcagtttataagggttcttgctgctgaccatctggggcatttgtcctacctgctcctctgtagtcttcatcagatactcaagttaacaaaaccaaatgtcaccttaatctacaaaaaagggtaatccctaccttgtcccagccactcatttctagagaacttgaaatgtacccaatctctaccatatggatagtttctacatggaacactttgtgactgcagagttctgctgggcagctctggcttcactcgtggtgagtgtattgaagatgagaagtaggtatgtttgtgatgggttttggagataccgtcatagttttctaattgacagaatgagttagaaaggaggaattactcatttgtgtggatccaggctggcatttggctttctgactgaagtaactggggagatggttcagatggcagagaacaggttagacatagaggtcaggagcatgtgttggtcatgtgatgccacctctatgagatcagagtcaaagtcagtcttaatgggggtggagaggagaaagggaagcttgttttgtgagctttttaatctaaaatcctaataagtcctctatgcttttaagtctcgttgtatcagttttacagagctcatcattgtctcttggttgttttactgcacactacttcatgctgctgcagaattgaattccacacaaatctttgtttatttaaattttgtttgaattatgatcttggatgccaactgaaagtgaccagaaaatgaggagtcatctttgctcaagagttagttgctaagggatcgcagatgttagaaccctggcctggggcctgccaccagcatgctgaaacctaatctttcccttttggagcttaacacgttgaaacacattcagaaggctggctttccgaaggagctgagggtctgtacatagccttcctttaatccaaaggatatcttttagtttataaaaaagtgataacttggcaatacatggacttttcaatgtatattagtgcagacacatgaaggtttacagtcctagaaatccctgccagttctgcctctgtttgttaggagtcatttgcctgatgagagtttcagtgagcaataatgaactggctgtggtaatgaggctacccactttttagtgcatgctttgtttgtgcacaggtgtggaagccagagtttaacaatataggtagactccctagccagcagtctccgcctccccactgctgggattccagacacccgttactgtgccctggtttttgtcctcaggccaggggattcagctcagttctccatgcttgctcagcaagcactttaccaacagagccttcttcgaagcccttgcagagtcttttataaaggtctcggtgctctgtgactagtggcctacaggcaggtatgaggtctggacccggcgaatgagctcacgttgtgctgcgttcttcctcatgcaggccttctaaagcatgagagtctgctttggctgctagggttcggggttcaccagtgttacatctgtaaacttgtcatgctggttccccacttcatgcttctagaccccatttaattattctgtatgagtgggagagatcacagacggggcttataaaagcacgccggtattgactttggcagtgtgaccccatcctttgttcactccactcttgcacactacacacccacagctcctggctccctttttctttgaacgttcactcgttaatgtattgaggtcttcgttctcccatgccattgtgtgagtcacatagattccaatttactgttcaagagagaaggggttttgatttttaatataatgcatgtgacattcttagtctgcttcctttctttctgcggtgacagtcccctcccccacgtctctacttgccagagaatggctatttacagaaccgtagccatagtaagaaaaacttaccagggaagtgtagagagtcttgaaacctgaatcttaggccacattagactctgagtgaactgaactgtaaagcacagggatatcggactaaagctgaaaacaaagatctaccagttatgtatttaagccagttcgtagctgctggaccctggttctctccagtctgtttttagaaccagggcactgggtctgaaagtccaaagaattggccaattcaatccatattttcttcttgcatggtagtaatttagaatgaaggaggaaaaagtaccctggcatgtctgtttaaatagaagcaaaagtcaaagcttaagaaaaattctcttctgagcatatgtaataaatttatgtgaatatgattttctcaagcattaacaagaccacaataggatgttgcaccaaggaacatggagcccagcatcagaatggcagttagatttgaattaagagtttcattagaaccatttgagttttgaattcttgtgtgtctgtccttacgttgctgaaccatttctgaaaaggatttagagaacaaccaagcctgcctttcttttaaagacaggcaaatgccaactctgtattgtcacagtgctgaaggagacagacaccgagctggaacatgactttgtagtaacagagagttaggaggagactttgaagtggttacatcagacaggcatgttttcagagtctgcagctttcagtggggattggggatgggagctgatgatgggaacattcgttgcatagaaacgaatcgtggaaagatggctctgtggcatggggccaggagatggcattataatgaagctctagggttttgatgcttggaatatgaaagcagggctcagcaaagatccaggaatcttttcctaatggcgttgtagtgaggccaagtagacttctttctccaccataaatgacaggcctcgttcacctccacaaaactgggcagtcagttaacaaaaggagagatgcccctctccaagtgagtctctctctttgtgtgtgtgaatgtaaacacatgtatatcacacactcacacatactttctctgtgtaaacacgtgtataacacaggcacacacacacacacacaccacacacacacacacacacacacacacacacacacacacaacacacacacacactgtcacacaaccgcatggaatgactctgtatatggaatcttctagtttcacctggagactcagaggtagcgtagagtgaatttcacatagatttctttgctcgcttagatgtcttttttttctttcccagaatgctttcattgagggtcttttgggaagttttctccttctcttcatgagatagtattttcactctcttttcttgtctggcctgtgtacaaagagccatccttcttaacctgatggccatagtctttatgaagagcagagtcccattgcccttgctgccattacatagactagtaagattggtactaggcttaattattttaaagttaattgaatttaaagttcaggtgagcctgtaattcagtttcccatctgatacatggttactataagttataaataggccactgaatagctttacaaagttaagatttttttttctagcttacaaaatgaacttgatattctaacatatttcccagctgcacaatttgtaatctcagtggtgttaagagccacagtaactaaggaaaattgcattttattcatgatgcaaaattactaaataaccttggtcttagaaaagaatgcttcatccttggagattttatgaacaggggtaaaggacatccaggaagccaagcagaagccagaaggaagagaaaggacacacacattctggctgtgccgatttttggttctcttgtctcttcagaggggaagtggcagaaagatagctttggtttctcttccagggctgcacagtaccagcctgcaggggccgctcagcaaatgtggggtgaattgacttggcacaaccaaagagacatgctatcagtggagactttgattggctgctggcttctcacacatgttgtgacacttgaagtcattcagaagatgatcttcccctaagtttgcatgaattctctgcctagtggggctaagcatttgacacattaatagctttgaaacagaatatgggtcaattttgctgttgcgtcctttccacaaaaatgtgtacttgaaagcttttatgacaggatcagcagagagcaaaatttattttctgagcaattatcccactttctgctaaagtttgttccattaactttcaccatgagttctgtttgatgtgtgtgagaatacaacctgagctgggcagtgacgtcaacagcgagagctgctagtgagaatcggggtcactgaggtcacacacactccccaccaccgtcctcactctctaaacaggactaaaatctctctgaagttgttgttacttgggggaggccacccccatgactttttcctgcctttacgctaaagtataaggcttacaaaaggcagggtaggtaccagaactccgctatctagaataatactgagtaagttgtggggtatgggataaatatgtgtggagtggaaaaataagtaaaaacatcagtgatggtagtttacatgttgggtgttcattcacaagactatgtcaggttccttcctgtcttgtgcttttctatgtaccagggctttggcagtgagtaggacatcatgcctgggttgattgattataatgtttggtgctgggttatccaatttagtaatcatagccacgtgtgctatctcatttatgtaactattaaccacatgtgactgtggaaatttaaaggtaagttaatagaaatgaaagcttcagttccttagccataccagccatatttgaagtgctttcatttagccagtggcaattatgctggacagtgaggacagagaagtcaccatctttctagaatgttctcttggatggatttgaaaacagattaacacatggatacttcctttgcagatggagagaacataggcttttcgaagaataagtatggaggctgggagtgcataggaccagtgtctgtcttctagaggacctgatttcaattcctattgcccatatggcagcttaggcctgtctggaactcccatcccagagagtctgatgatctcttttgtccttctctacatgtgcgtgttacacattcatgcagacattcaggcaaatgtgcatacacacacaataaatctcaaaaaatattaaaaaaatagataacgtatgcttctaagatagcatacaggagcagagattgttggttgtcgggtgtggctttctagggggacttctgacctgaggcataaagaatgcataaggattagacaggctgaggggaacagaggagcatggttttaagtggttataagtggagttggtgctggtataggagcctttatctggctatcagtgggaaggttgtggacttactttgaggactaagtgaacctggatggctggtatatagcaacaagctacttcttacgtagttttttgtttgtttgttcatggaagttcctgtcttcttgaggaccacattctcttaacagctccctaaatagatatttctgcctgtagttttgactccctcatccgtctccagcaaaccctgattctcatataagttatttattcaattgctaggtaaatgccattgccttccatacttagcacaaagccaagaggctttccagagcatttcttgaggtcctctcatgctctcctgaaactttggttctggactgtttacactgtggctgcctcctccaagttgtttatgatggctttgcctagtctccgaggcagtgatcaccaccctcacaagattgctaccactaacattgccttgtagagggaggcagggtaacccagctgatgcaccaaacacacagggttcttcactggaaagctcatgagactcatggagccccagggttcatgagatgtctgggatgctcatgaggccctctctgccttaggtcctgtgaaagaggaacagtgggctggtctgagggtgggactcctggggattgtggctgccctggggacttcacagtagtgaagtttttggtgagttgtccattctgtgcatgggactcttcactggtaaaaccgaccttaagttgctcaggggcttcctggtgctatagctgcctttcagtcacccacccttctataagtgacctgcaataacctcattggtttaccaaggtggaccttgatggaatcctttgttcctttggcattcttgctagcagaggtgaatagaaacaggcatttctttatgtctccccaggaaacatcaaatggtgttacagagtaactgtcagccctgatgctgcagaaaaccacacctctcatttcctgtttgccccaaatgcccagcacagtgtctgacacataggagggtcttccaagtgttttccttatgagttaatgaatggaattgataatctacccaccatctccaacatgtgatcaatcttaagcatgtttctggggtgaacgtatacattatcaccagcccatttgtggaatcaccttaaactcaagcaggaagatgggagagagtcaggccacaatgaaagcaagacccttgttaatttgtttttatatcaatgctttgaaactgaaatataatttgcacacactactcactcacttaaaacaccagtccaacgacttggttattttccaaattatgcacctatcaccacaattttttttttgagacagggtttttttgccctggaactctctcgctctctgtgtatatctggctgtcctcaaactcacagagatccgcctgcctctgcctcccaagtgctgggattaaaggtgtgtgccaccactgccctgccacaagacagttttaacgatacattcattaccccagtaagagttccaactctaggctactaatcattctgtttccatgaatttaccttctttgggtatattgttcaactagcatcacgcagtgtgggacttgttgcatctggcttctttctctggccattattttcttggaggcttttccatgtcgtaacgtttgtcagcatttcattattcatattgacataataaccattgtaacaatacaattgctatccattgaggacatttgtcttgcttctgctttgagtatttatatacaaattctctactggatagattcttgcatttctcctcactaggtatttaggagtagagtttctgggtacatttatatttaactgttaaagaaactttcagttgttctgaagttgctaaagcattttgcgtttctgtcagcaacgtgttagtgacctttattcttaagagcgagtcttttcttcttttctagtacgtgagacagtcttcctgtgtcacacaagctggccttgggctcgtgagctttatgccgtctccgcgtatagtgctcaggtaacagctctaaccaaggctatataggctattccatcctctcagctagtggtcaggcacatggtgcttccttgtaagaacagacgtgtgcagtctaggtgagagcgtcccagtccttcctgaatctgttggagaaccctctgcctactagacttccattttgtacccaactgggttttgaatttatacaaagtacatggaatgtatggaaaggtaaataaaaactcaggcacagtttcatacatttagcacaactaggaaaggcccaagtaacaagggttttggtttgtttgttatgtgacaggattacgctaatgctgacagtgcttgggtaacacaagtggtctgagagttggggcttgtgcaaagaccaatctatgccagagattaaaaaatgtctaaatgtaatagcaactctgagcagagaagtataaggagtgcagctgtagatagtgcagagaccagaggagcctggctgctggtgtcgctgtgaagacttgcatggcaggtggaactatgtaggagcatggggctgctggcccctgtgcaggcccattcttccttgcatgagcaacgttcttggtttttattttcttccttttttttttttttgaagctctcttatttcctagaaaacattgcttactttatactgaagacttaaagtttctttggttatagaaactcacgtcgtcactgaagtgtgctcttaaaaaaaaaaacaaaaagcaaaaaacagttccccgcatagcaggcataaataacttgctaggtatgaatttaagcaggtcaaatttgaaattctattctaattcaaagcatgttgtgcagccctgctttcagattggcgattcaaatgttttcccaggtaatgcagggggatgttgagataaaccaaggccagcgggaactaagaaaggcaactggatgccaagcttcactgataagaggaggcccggtaatctgatggttactttctggttgggttgttcaaagatggaatgattaaccacaccacaaatcctttctatattgcagagggatggtaatgggtaccttctgatgttttctcaagaaggtctgtggggcttctgttctggaattaggcttatgtgttacagcttgagtcagctgagctatgtgttgttctgaaggtggtgtccttttttcagtaaatacttacgaggatacctcctccatgccaggcattaggctgacaatggaggagccatattgaaggtaatatcatcctttgatttgaggagctgtgcacccacgtttgatgggaagtggaaagctggtactgacggaaagcatgatgggatggggtgatgatatgtcttaccttctttgtgcctgtgccccagtatctttgctactctagcctttagcagtctttttaatctggttatgagtttgccagtgtctgtagacattttgttgtcataatttggcaatgctagtgtattatgggatagaggctgtgttatcgaaatgcacagaaccacttttataacaaagagtgatccagtcaaaatgccagtagagaggctcagagacctggacagagaaggtcatgaactagagaggcctgtaaagcctctaacaacaaatccctgtcttttaaaaaccaagatttttattaacattggacataacagtggaatgaaaggagtgtagcttctaagtatttaaagatggcaacggcagtgaaaacaacacagacttgttgtcagcggagtctgtgttgggaaaagaaatccttgcttgagagtgtctccagacagggcctctttggtcacttggggtgggagaattctgtgtgtggcattgttacttgagttgtgggatgtttagcatccgtgacacacattcattaatgacagtaacctgtcccctccagcataatgacaaaccatggacatcatgttctgccaaatgctacagaaagagggaacggcccctgttgagcgactctaggaaggacaagtcagagtgtgtgagttccagatcaagttactcctatgcactgaatctatatctagggagtaggaccccggggtcaagtcaggggtaaagtgcaagaagagagccccgccatctcatttatttctcatatcatctttggaaatgacacttttgtgtgtattttaagatttacacagcctggctatagcccaagcatgtaatttatgtaaaaacaaacatgcatggcttagaaatgtggcattttcatgtggaagtggccctcagaggaaccagggattcaggcttcattccatccctagagcctaagttctggaaggagaatcctagccaggaacccacctctgttgaaggtcacactgggtggtggacattggtgtcaccaagaagcagccacccactgagttccatctcccggcatttggagagtggcacaagagctttgggcaaaaattgacacgttcccttgtcacacagagtcaggatttttaaaaactggcaagccaccagggtttttcaaattattctctacatgagtgtggaaaatactattccctgacagaaaatttgattcacactttacaaagagcatggggacatggttgaattgcataatcgcctcttacaaaaggactctgagaaggaactgcgtcttccaggcttgcctgcaccagtatgaacagaattgcaagcttgttttcaaacactcgggctcctcattgagcagcgtagtatgactttataatcttaagacccctctctggaaactgttcagggccatggtccctgctcagttcctctctactgacgtcagaccaaactacacagagataggcctgttgaaggagaaaacttccccgactatggccactttaagatttaaaccttgaagccctgtctgaaccccatacccacccctctattaggtgctcattttgtcatttagcatgggggggggcatgtgcctgtggtcctgcaaagcagccatgttttagaattcagccggtttcttagattactcatgtgtggcaagacactctgctttgacaaataaaagtttttctccctggggacagaggcaggaagaaaacagcaggcctagttagggcctgttcttggcaggcaaggaggtttgtgtgatgttagcggaacagaagtgatgttctggtgcttttgagccgcacacagctaactgtgttgttttaagcgcccagtcattgccccccagctttgtttaagggggatgtgcagtgcttctgtggctattaaggtggaagcattcagccagatgaagtcaagttcaaatcacagagctagtgacctaaaagatcttcagaaaccataccagttgttttttcaagttatactgtctttgctttggagaggtagtctggtagagcggctgaaggtgaagcctcagcctgccgggctggagttccctctgttcttccttagctgggtcacattgaagaactgtatcctttatgcatcttcctcatctgtgatgcagacatgatagaaaacctgtgcttggttcctagcactgctttttagtttaaatgtgtttagaaaaatgtcactgtgtgtaaggtacacaagtgaaagacaccagtactgttctcaacttgaaacaaagtgagtgtgaatatctccagatgtacagcctgtctgtgaaggacatcattttgtggctaaaggcttaagaaacagtatgttccctttagttgtatcagagttccatcagtatttggtcaaggaatacaaacattaatccagtggtcatttgctttggaagcgatgtccctagatggaggtgtcccttttgttacactgacactacatatttagatagagccagaagggcccccttcccttctcaaagtgctgtgaccctgtgaggaggggattggggtttaggatatatcatagaactgggtctcaggaaaggtaatggaatgtcctcctcatatattatgaattagcaagtatgacctagagatgaggtggaaatgctgtgttgactttgcttgggtctaaggatttcctaacttttaagagggcagattgtctcttgtcagttttcaggccctgtctctctctctgcaaaaagtgtatttggcttcggtggatttgaatgtccagataaaggtgataagtagctgtttattgatatcatgggttttgatcccccctctgccaacagtatagcatgccaagtacctacattaaaatgtgagaactatgttaatctcccagttgtacccagatttgataggtcgaatttcaatagacagttaaacagttgagctctggtgtaagttgacccagggttcatatctatcacagatcttcatacaggcagttatcacaattctgcattttttcacagatagatcatttcatttatggatggttcaaactcctcattagacctgagaattttaaggtgtgaagcccatggttcctctagcccgtgacacactgtgggaaggactataaaacattttcacatttcactgacctttcagaggtcaggcagcatggtgggtgccttaaaatcctgctgcatatacactgtctgggttttccctgagcagttcaaaggctgtgcctgtattatctaccagtggggatccagactctctcagtcttataccttgctgttgcagatagtaattttatttgtagaaaacccatctctttcaatattaggagttgcctgctactctttttatattatgaaatttggtgaggtaggtcctgtgttagaagctttagtaagcatcggaagacccttgttaatgcatccctgagctttcttctttccagacctcaacactttgatcttttctctttttaatgtcttcaggaaaactacagaagatgaaactcatctgcgaatctctttgattgcctttcagatcccccttccagacagttctgttacagatttcctcaggtccagggacctgaaaatagacacgtttttgtccaaaacttgcatgcgagaggatcttgtatggttaaccattttccttcttgcctcttcagcttttctcccccttagaccctgccatcaggtttcagattagattgaggtcctgtgtcttgaaataaggaatgagtaactgcagctggagacaaccgtgagatcaggtatgggaaaccgggaagtgatgctcacactcgtccttctttgagttctgccgactttcccctttccttcatatttcttactcttcatatttcttacagggagatcgtccacattcagtgtgtgtatcttccactgcagctgctttccttaagatcattactgaccctagaacccctggacttccttgacttttgttgttgaagcagttctgatgggcttaaaactaatggtgcattcttggatcatgaggttcttgagttggatgctggtctgaggtgtggctatatccattgcccagcataatccagcagagagctgagctctctatgggctcatgggtcctctgcagcatctttaggcttttggcccccagctctggactttccccctgctacagaaatgagttctttcacaattctagataacacatcaccaccccaggaaaagtagaagaagaaaagtctctgagttcccattatgtatctatatgcattccactgaaaggctggcttcctcttgagccaatttgttgccctagccacaacaactgggcattggctgaagccagccaaggttcatctcaagagatgtgagattagttgatacagatagaatccctaagagtgagaagagatgtaggtgtctttgaaatggatcatctatagttttttttcttgaaactcagtttcttggtctcaacttggttctgtcttgacattgctaacctgcctggtttctgcatatttccatttccctggtggactctggtggctttgcttgtcagcgtggcttctctgggacacataggctttcttaccatgctagctttcattggtaattttcacttttttggatctttataccgtctgcggacaggagttcctgaaaatatgtcaagtagttcagtgtacaaaactaacatattctagaagactttgggatttttgtgtgaaaacattgttagtagcatcttcaaaaatgttttttccccaaaccatgtacctgtttctcttgtgtttttctctcactgtaaacagtgctttcattagcttaaatttaatggccttctgtaagcggaagtttctgtcacacaagctgctcccaagcaaccacacagcggcttaacattaattataaaagcttagccaatagctcagcttattactaactagttctaccatgtggctcatgacttgttacctcatttagtacacaccctgcttcctctgtgtctggttggtgactcccttgactttgcccttcttcttccttgtatcctcctagtctggctctccctcccaatctcttcttgcccagctataggccagtgaggtctctattaactaatgagactaatacatacttattacaaaggctgttccacagctaccatctaacacactggtggtgtttgactctgaggccagaattccttattcacatcagtgcttgtctttctttctttctttctttctttctttctttctttctttctttctttctttctttcttcctatctttcttcctttctcttccttccttcctctgtcccttcctccctccctccctccctccctccctccctccctccctccctccctccctctctttctttctttctttctttccacttctcctatgttgctgctgttgttcttaaatagtaaagtcaaaatacagtaaacactagtggtcatggaattacacatgtgggtgtagataccatcactgcccaaactggacatctggctcatcatcaccacaggatgggtcggaatacccattctgagtcagctgaaggaagaaagcatgtgacaggtcaccttaaaagtgacacagattggggaacaccctgtgcaaagtgggatgaatgtgggcacattgcattatatgacagcccatgtctcagtagttgtcccagtgacatctctgcagaaaggataacagcacacctcactgcacctgatgcctattctgcactttccagagcaggcagagaagccaccatatctcatgcttattcaaaacagaaaacctgaagtcatctcatatgacccacgatctcgtccacacaccttgccagtcagtgacagtcagtgtcacgagcctgccctgccttcaccaccctggtcatcactacttcagtttggttccatgtcacttttcaaatggtaggttcagttgtgggagccacctatcttaattccttcttggtccatttcttatacagggatcagcaatccatatctgtgatatacctgatagtaaatagtacagactttgccagccgtctgctctctgctgtaagtactcaacactctggccactgaagccaatggtgtttctaaatgagcaagcatggcctgagttttagtcaaacttgattacagataatgtgcaggtatggaaatatcatactggttcccctcaaatagatacaatgaaagtgaaatgacagttgaaacctttttgaatactttatttatggacaacaaaaccttaatcttgcatcatttttatgcgtcacaaaatatgaatcttctttttattagatcacagatcttctggtacctttctctgcctggcaggattcagccatccccagagccagcctctctttcatgcttcagacagaaaagcagacatgctgtaaccttgtagctctcacagacctgagttctccttccttcatggctataagcccactcccctccctgctccccagacccaaggtggccctgagggataactttcaccgtgcatacaggcaagcaacatggtatagatccccctcaccccccccaaaaaaacctgccatgtgaatcagcaactacctttttccacaagtctaaaggtaggtcctgctgttcctcagagagcccactgtgctgtctgtagtgcggtgttctggaactgagggggatctctttccattcaggacctgttatggctgcacatggggtgtgatactacctcctaagaaagctgccatctgaaggatcatttgtctctacttcttcctgtgggtttcttttataaagcacagcacttttaatttttatttaaaaaccattttaaaatgtaaagatcattcttagcttcagacacaagcccctcaggctgcagtcagctgacgcacactctgcctggttacaagaatgagctagctaaaatataaccctgaatgttttacttaagtcttacatctatacaaggtatgtcagtgggacctgagagaataaggcccctctttcttaagatggcctattgaattttttttttttccgttttggtcacaaccctggtgtcacagcctgtcagttcagatctttcctgctgctcttgggaatgccgactttcttgcagtcttctgtctacctttctctgactttcagggatgtctttctgtttccctcaagcctcctcatgccatttctccagtatatttgaattgctgctttatttgcaccactagaatatttcctgcaggggaaacagtttctactccactctgttcctgacacctcacttttagtcagtgccctgctaaagtgggcactccataaatatttgctgaatgtgtgcaggcgtgcgtgcctgcgtgtgtgcgtgcgtgcatgtggactgatgagtaagtgggatcagagagtccaaggagccacctgggctgttttgttataaggcctgaccacagagttgctgactttacaggtcaaagccacttcttaacacagggatgggtttagtccaaaagtttgtttatacattagtttagaatattggacacatctcagtacaaatgatgttaaaaatttagatccagtccataaaaagactgtttgacaatccttttgaaataaaattagaaaatagatttgatgtctcaaaccttttagatgtcgtaaaatgttttgttgggtgatcgtgcctttatttccaatacttaggagactgagacaggaggattactgtcagttcaatgttagcacgggatacattgtgaattccaggctagtctaggcttcacaggtacagagtgaaaccctgtctcaacccccaatatctgtctatctgttttaatatgtgcatatatatgtaagtatgcatgtatgtgtgtatctatctaatttgtatagttcaacagaaaaaaattaaagggtactccctgggtatgtctgttagaaattaaacaaaactgaagatacaggtgcaatgtgtacaaagaaagtagatagagtctgaaaatttttaagagaagtgggtattttaaacatttttacttttacaaatttcacacatacatacagtgaaatatgtaattctctactcccgtgtctccttccaccctccaccctgcagcacattccccttcgagatgcaggtgtttgttgataaccaccaagtccagtcagggcagcccatattgtgcatgactaagagctcatggaaagctgactagtggccacattttcaaaaaagagagatttaccttcccgctgccagtaaatcctccagaaggggtaggattttgaccggcttttccttgttcaggtaaccacgggtgctgtgactacatgattttcatgaccaggttatgtccagaagatggcatctcgcagcattcctcctcaccctctggcttttatattctctctctctctccgtccttggtgttctctatccatggtagtggtaggattgatatgcacaccctgggtaaggctgagcacagaaactcaggattttttttttaagatattagttcttttatcctagttttgttataactaaaaacatagaaatttcttgcctttctaaatatttatcatgaaaacattttttctcatctgaaatattacagccctgtttctggactcaaatgtgaagattcatagacatattttagagacaaaagtcttgaccaattcattctaacttctgtaaaattgcactttgtcttgatttttttgttttctttttctagaatcattgtaccccctgcatctttgtctctgatcatcagtgtgtcagtgtgtgtgtgtgtgtgtgtgtgtgtgtttggtgtgatctttaatttccttgtaccttggctaggagaacaggcttgtttttgtttactaattgactgctgaatctgccgtctgttcaacatatattgactaaagcacactttaagtgtaaactagggtctgacaggaagagggtttggaaggaccaaggggtgctggttagacaaaaacagaagtttgaagtggaagaacaggacttgttcagaagccatgaagattcaggtctttgttggtagtggggtatgctaatataaaaacccttacagtatacaaaaataaaaaagtatgtatctattttgtgtgaatattttgtctgcatgtatgtatgtgtaccatgtgtgtgccttgtacccatggaggccttgtgtctatggaggtcagccaccatgtgggagctaggaaccaactcaggtcccctccaagagcaacaaatattcttagtttagctctttagaaacatctggaataaacagataagcacctccagaacttcattgttgtgtatcacgtacatgtatatagatatgtattaactttttttttttttcaaaaccgggatgactgcatgtcacctcatggactcttaagtgcccacatggatatgcaccattatttttgtgtgtcattaaaaagaagaaattgtcagtttgccttccacactctgtgccaggtgtgcattctgattgctcttctgctgcctgtttggtctttccttgtcttccctggaagtacatacatggtctctctggtcttctggtttggggatctggccaataggggacctctactggagggaaggagaagagtggggaaggaattttgtcctgtaccttgcctgaaggacaccttgtaatgactgtgccctaagatagacgggtactttcttatctccatgattgtgtctctgcttgcccagcctgacctttctttttccatctgtcccttggtaaacttcccacttatgaatgccaatgagaatgccaatgacagcatgttcttccttcccttctggaactctgagacactaatcacaagttgtaagatgtgtcctgatttctaagatgttgagatatgctgcactaagaattgttattctatatctttttcctttcatgtaaaaacacatatgtcaatgtgaagtctgatatgcacatactcctggtaacttcattcgtagtaaccctcccagagaaaaacaaaccaaatacttgttaagcaaaaacacactatatctatgtaatgaaatgctattgaatgataagaaagaatgactcttgaaatatgttacatggataagtttcaaacttagtgtaagtgaaagaagacaggtacagatttgcattgtcttttggttttaaaggttgaaaaagctgaaatcagtagagacaaaacattgattgtagtgattctgcagggctgaggatggggaattgggattaactgtattcaggctgatggtaatactctattctagattgtaattattacacaatttggcagagttacttacaaactgagtttgatgcttaaaaagacaattatgattgataaaattatatttcagcaactttgtttttgaagaagtatgtattagatgtcttacatttttctcttttaaaatttatttgctgagaattttgtacatgtatagaacaaaataagatcatattgagataataagatcaaccttaacaacttccctgaatcccccaacacattcttctttcaacttcatgtctcctccttcttctccttgattaaaaaaaaaatacaccaggtccaattagtgcttcctgcatatgcatgagtatggggctatccactggagaatggacaacttaaccagtggactactccaaaagaagaatgactttctctccagcagctatcaactatcagtagctcttcagatggggtgagacctcatgttacagcttgatggttaacccaacattttcttttcaggatcctctaaagatgtcatcatccccagacagcaggaagtaactttaagaacatgatgcccacattcccaagaggtggggtggatggtttttggtcactccttgggttatggatactttttattgtttaggagcattgattccaaaatgttgttggttacaaacaggaagaaaactgaatgaaggggattagattcaagttgttttgaaagaaaaaagaggatacagatatgataggataaaaatggtagattacatctactactctgaaagaaagaaggatatagatataagataaaaagataggttattgaatctactctgaaaaagcaactactagttttaaatattttacattggattggacttttgtatattacatacaaataatgtatattgacacaaatttgaaattaattgattaaaatgtactgtacacatatttctaatattgttcaaggtattgtacctatacagctcatttaacaatgtaatgcaaatttctagtccttgaaagttattattaccaactatataaactatataagataataaggaaatgtaggtgagtaattagtcacctattataatcaaatttgtagtcatattaggtatgttttcaaggtcaaacagagatatattttagaaagaccagttgtcttccaacatttcagagatctgtagaatattgcatttaaaatgttttaataacataggtttttttatgacaacaagacatgtctgctcttggcagtaccaatgtatttcacagaagatgatgggcattgaagaaattcacatggagttaactttctttgtgcaaaagtatccactggtcaagaaagtgcccttgcctcaactgctgatagtatgctgtccaaattggacaaacaggacaccaaagagagtgactgctgaccttgccaagacaaggtgggacagtcctccaaatttctgcttcacagaaaagtctagatatgctaggcctataggccaaagatgggtgccccaacatggcagaggaaccttgggtgatttttcaggctgtttcctgtttttgtcatttctgacatttttttttttatttggaaacagcttgctagcacttcctgcttactcagttaatattatttcctttttgggtctctgagggagttgaagagtagatagtacagtgatagttttcattgtttactagattcagaaaagaaattcactaaagatcatttgataatgcaaattaaaatagaaagtgaattggttacagcatttggactcaacatgatagaatagatagatagaatagaatagaatagaaaatagatacaaattttctctgaatttgtcaaatgtaaattgactagacattgttgatgagcttgttgcctgtatatatacttattgtatatagttttcttatagccttctcctgttgcattaaacaaaaaacgggtaattgagatatattgtttatgatttattaaagccagtgaagatcaaaatagcaaagcagctatactagataagccaggcagtgatggtacacacctttaatctcaggactcaggagacaaaggcagatggatctctctgagttcaaggccacccggggctacacaagattgaatcagtctaaaagagtaacagagctcgtgcctttaaacccaggaatcataagaggtatttaagacaggaacaggctctcagatctggcattcgttctccagccatattgaggacaggaaggcattgattctccagctgtattgaggagaggcagaagtctgaggcttggtgagaactcatggaggcatgatcagcctgttcagcctgaggtagaggtaagagctagtggcttttctgattcgctattttgatctccagtgcctttcataaatcataaacaatatatcaccatagcttcccagtgtaaaagaagcttctttgactaatttaaaagcatcacaaatctatggatataaacataaatgtttaaaaggcagtttgagaatatgaccacttagaatagtagactccacctagggcttctactttccccagccttggattttgactgtgtttacatatagtaccagacatgaattctctcctgtgaagcaggccttgcactattgcaccagtgggtatatcttgcctggcaggttgctattgtatcatgcaagggttcagtgcttgataagactgttggcgtctttccttctgcagttgtctgcatggcaccttttgcctctatgtgagagcctgccagtggggaggaagtttcccagtcaatttgacaatgttttttatgccttgtaactaaagtgtgttctgtcttcagccacaacagtgtcttccatttagtaaggtgggtaactaagagcagtgggtatcttccaatatcaggaaatatgaatgtacttttatatccaatgtgtgtcatgctgattttttaaatctaatttgtttactgtcatgcaatattgatgatgtcatggcagaagtcttctcacatgaaatcatggaaagtaaattgcagtatttgtcaaagactgcaggggagagttagtgcctacagccggaagctctgttgcctcgtgtcttgtcaccctgtccctccagccagtggctcttgtccctggctgtgtctctggagtgcttcggatttgatactcattgctgcttgggctgctcttcactttcttataaacgcacaattgaacatgattaatgtagagtagttacatctgcatctgtcagcccccgattctggatgctcctttatctcactgtacatcttgtagggtatccaaacattccccagcaaaaccaagtctctccccttggtgatcaagtattctaatacaactgctatgaaaatgaaggtaatagcacattacttctgtttgattgctgtgtggtcttgcgtctcagggataagttaaacttttatcacttttccccctgaacaatgcctttgtgcaattccctatctttattatgtaaggctatatgtgctccttattgttgaatttagattagatttagtgttcatgagcaaattgttttaatccttgttctctacattgccaaggataaacaggagttggctctaatagcttatattcttgttttggatggtgtgattaattacatataaatattatttcctgttaggcgacctttttagtataaatgatccgactttttttttttaagcacttggaattaattttccctgggacttgtttctttcataaatggaaggtcaatttttcatgctccccacctatttccagtgataataatattaaaaggctgtcacataaagttaaatgcagttgaagcttaaatgagtcatttagcttaattaaagtgcctactatgcagcagcagtatattaggagagtcacatgtagctctcccctcaaggatcttaatggctagtgaaaactatgacatagaaaccactgacctataaaagaccaaagtgggtacccttcaagatcctggtaaagtagaagaaatagaagtaactcctgtttggtgaatttaaaactaacaaagtggaatgcaatttaggaagtattcgttttaagacttttgtaaggaataattacttttaaattaattatatgttttgtatgtgagggtggcaggggcctgcacaggcgtgggtatcagaggacaactttagggaattggttcataaagctcagtctttaggccgtgctttaccaccccctgagccatctgatagctcacctgcgactaaacataagaaacagtttcgtctttgggtcttttgaaaaggagatctttgaaataaggctaatcagtatccttaatttacaaagtgaggcacaggtctcgactcagaaggggactttgtagatcacactgaggctcagggtaaaggagtcaggactctgattaaaaagctccaaacttacagggttgctgccttacccttcatgtgcttgccgtacacatctcctggggaaggaagcagactaccagagaatgctggagatgggcagtgccaggtcctttctgtgtgaattggaagtcaagagcatgttgttaaggtctggccactgatttcagccagatagaactagcaaggacattaacaacctccagaggacaaaatgatatttcgtgaaatcttttagttttcttcttatctccccagtggcacggagtaacttgccatatgcgtgtattgctgtacaatgactttgtgcgcctaaagaatggatgcatttgtgtctatactgatggttcttgccttactggttacctattgttgaataacagatgattttgaaacccagtggtttaaaacaatatataatgattttcgccactccatggaagggtgggattgcttcttctagtctgggctgcatcattaggggcagaatggcctaggttagctttgcctttctaggctcctagcttgggttatggggtaaggtccttgatctcaaggaggctggtccagacttctgtatatgcagatcctggcactctctcagtaacagtatgatctcaggtgctttctaagattacctgtgtgccccactggggaaggaggactactagcaacagcatctccaggcactgtattgattctgtctcagtaggaggaatagccatgttgactgcatgtgcttgtgaatctacacagtatgtagcttctttagaggagactgtgattggtggaaagttttctgtagtagggaagagaagaggctgatgctcatgcataaaagatgggtgtccactcacctcgtgtcaactaccttgggcacactcagtactttaatcctgaaaagcactggaaagacagcttattcctgatctccaaaacagacagcggcatttgaatacccaaggagttggtgccaatcacagagaagaaggggcctgtgtttcaaaagggacctacatgggaccagcactcatacctgcatggacctgggaaaaaccattcagtagctattgtcttcctctgctatatcacttctctggttgggatgcttgtaaaacttacaagttcatgactgttcaatttatagcccttatatatgtaaaatgaaatcattattcccccaccccttacaaaaagtagacagtgacttgtatataaggtaggaggattttatggcctgaccccaaataaaagaaaacctgtctgctataactgccttaaggatggttgacgaggaagaagttacctggacggggtctgtccttggcagaacaggcagagcactctgaataaatgactggaaagaagttgccagaaattgttcctaatgacctgctgctagttgagtgccacttgtgtgcaatattgggcagaatggcacaggagtacttcatttgatctgaaaataatcataaaacttcatgcagggagctccattctttttatttttattttttatttttacgaggaggatacttcccagcaatcctagttttgtgccttgaatggccagggtgtcacagacacttctcttcttctttccctgtacctttccctatctttgtaactttatttccatctgttcaccatttttccttctttaagaaagcagaaatattcatggatgacaaaagataatagctgacattgatttctactagattatgttatatggtatctttttaaaaggaatctttatcatgaccacacaagacttgaataacttatgtcctaagtataatgtctgaggataagcaatggctaaagtatagagttgtgaagggaccccacatgatctgagcttttgtgattccttatggaatggtcagacataaactttcatcgtaacagtaagggcctggaacccttgttctgcctactttagctttcaggaatgaccaaatcacaatggccagtaaagaaacaatgtctgacagttatatccatgactcgggtgattcttatatgcttggtgggagacccatgtgatgaaacatttcaaattactttagaaaacaaattcacttccagtttatagtataagttgttttattagaagtgagtaatctgttaaaaatgagttacaaaaaaataaatagcatacttctatatggaacacagttactgaggtagcttcattcttaatgaggacttgagacctaggacagagatagatggtcagtccagatgtgcacactgaatgaggaggagccagcacctgtgttctgctttgtcttatagtccaggaccatgtggtaaacaggctgcactgatatgatagggcgggcttattcctgacctaggtctgcagtagcttcaggaaacaggctggcaggtgactaccccataatatattgcttcaaaatctccctagtcctcactcttttgctgtacacacccttcctgaacaggtagccattgataactttggaggcagaggaagctatgaagcaggtacctgtacactgaaaatacagtgagtaaatacatccttgatgtaggccatgggaaaatggagtttcaacttcaaacctactttttcataaatgctctgacactggtggtgttagaagataattttaaatgatgacatatttttctccttgggagggtagtgcactgggctaaagactagagggatttaatgaatactgcttctagatgtatccgaactgagtggctttgagagtgaaagctgctgctgttaataatgtcccccaatgtcccatatgacctgggacaccagggatttacatgaggggactttagagcacagtggctcaggaagcttgggttgcttgcataaattccataacctgacaaagttgtcctaggtcatgtcttaactttaaaaagcaggaagaagaagacacggaggaaggaaagaaatccatgcatgtctttggggtaaacttttgaaatagggcaaaaagaataacttgactttgctggctgtagttttaagtgatcatgtaaaattgtcttctaacaataaaactaaatcaccagggtcagagtatttatgaaaaggtaggtttgaagttgaaactccatttccccatgggcctacatcaaggatgtatttactcactgtattttcagtgtacagacacatgtttcatagcttcatctgactccaagctcagggctctgaaattgccatgttggttctcctgcctggatggcacatttgagttccatcttctgctctggacattgtaatctgtacttaaagtatatctttcacggagcagtaagaaccaaggcgggaaaatgtccagggtgtgaattcttgcacccaccatggctcagactgaagtatgaccttcagtgattccaggatggctgtctgccaagttgtatcacaaaagctctggtggttgaggtcctaaataattcacattatctctagacatcaatttttatattagtagagactataaagataaactcaaatagaaaacttctgttgaatccttaaatttgtttaaataattggtgtttgtactggatagtctcagagatacttgtccatttttaaagacatttaaaaaaataaaatattactaatggataatgggttgagggtgtagttgccgcaaaaaaccatcagacagaaatctctgcactcaaaaccagtatagacaacctgaagaagtactgtaggagatttgtatttgcacctctttgttttttattgtaagcctttgacatgctttattaacacttacatatttggactattgaagatatattccaggcaaaaccatgagatacaagcaaaattcagcacagaacagctctttatttgtatttgtcagtatggatgggctctgggttcttctagcaaggtttctgtgagtttctcaagagcccccagctcttccttctctggagttggtgccttaagagtcaaatatctgtctgtttaatctaaaggacacttgtaagcagtggtggttcacacagcttcttatgtggtcttgcccacttcctttgtaggttgagaagagtgatttagaagaatgagtaggtgactcaggcatgatgggagtgaaaatgaggcaagactgtgccttccttgccaccgtggatccccttggtagcatgtagcccataggccgctcctgcatcatgcgccacccagagtcagagtcattcttctctgctgtgaaatagaaaactgcccttaagaatagctgcatggaaagcagcatggaaatgtggggcttttgagaagggacgggataattgctagctgtgctccataaatcactacacttccctgaaggctgtgataatcggtgtgagtggactcaaggtttcagcgggaaggaccaggggagacacatttctcattgattccaggtagtctgtgaattctgaagaggggctgaggcgtcaccggaggccagtcagctctgggagtgtgctgtctttttctcacatagtgcattcagtgctgccttcttggtttgcactgagcgcagtttcagagaggaaaaataaataccccggatgctacaggagacatccacagggaacatcttatttctggtccaggatgctggctttccaaattttctcaatctcagtgtggcttcaaggtttctcttcacaccaggggagaaatggcagcctctttcaagaccatattgtttcttgagctggtacgggagaagttggctgctctgctgcacctcatcttcacactgcagtgggttttgtatcgggctttatggacatgttcttttggccatgtcaacccaagcttggaaggttctgatctgtgtgaagcaactagtctcaggaactcccctcagttaatggcaggatcaaggcctaggattctttgtgcttcctatcttgtgataatactgtaccttagagaaaaaaaaaatccaaggcaaacagtagtgatgtattttgttatttggcttatcttgttgacagattaactcagcggaaaagtagtgtgccttgaggtagggttcccattcatcaataatgataatgtaagatttgaagatagccatatcgtctagggtgaaatgtactgacatcactcccatctataactcattaaccacacttctagaaattaatccaagatccaaaacaggcaaaagaaaatatacataggaatgttatctgcagtggctttttcctgaagaggtggggaaaaatctctgtattaaattcttaccagtaaaggggaaattaaacaaacttaatttttgtatagtaaagtattaaaattaaatttacaaatagtttttaaggtggtaaagtgatataatgtgtgactaaatgagtagaattttatgcaaacttgcactatcatttcaaaactatggattggttcagagaacagactagagggaaactgacccaggttccatccagacagtgggattgcaagccattgctgtttcttttccaaggtttcatacatgttttctcagattcccacagaatgttcgttacatttgtaagaaagggtgaagtgagtttttgtcttcctgacagtttcccagagcatgggaccaggatcttggtcctggttactttctgatataatccaggaatgaggaaagtgcaagagcctgccttccactgcatagtttgtttccacaagcagaaaagacttccttgtatcatttggcacagtgagaggtctctgttcagagctgtggcccagttgggatgccacccactcaggccctttctccatctcctaaaggagagaagcctgggcttcatggaagctctgctctagcatctgctgtctggggcaacctggcccatagcaaacttctccgaacctcagtttttcatctgtaagtgaagataatggtagtttctttgtggtgacaagaaatggtgtgtatatctgggagcatgagttgtaaagacataatccatcggtatttgctgtattgctttacttcctctggtcccctctctggtgttagtgggactgtatgtggaggggaagtacttggccattgacaaaactcctggaatccagttgtagagagggaggagtgatgaacaaaagagtcatatatatatgaaaaagctcattccttgtgctgtttggtggggacttggatagaatcttaagaagcaggatgttgctagatagatcatttcagaaactcaagagcaacaaatggaaacccctgatttctaagaactatgaacctccagggttaagaaatctgtatgtatttatggaaatttaatacttacaaacatttgttttcattagctggaggtctagatttttattatccattagtggctatgggtctttggcaagagaagttctagaaccatgtagaagacgtttcccctctacttttattcattcagtgtccactacccctccaactctcagttttccctctttgttctctgagaaaatggctttcatgcatttcactttgtaaaaataacgttattggggtttttgtgtagtgaagctggtgatcaaaccctgggcccctttcgtgtctggcaagtgccctctcactgagctgtgcatctaacctacaaacagatttagatagtttctcaagttagagtctaataaaacacctgagacatgcagacacagactggaggattgtgtgtttcaggccagcctgtgctacatagtaaaacactgtcccattaaacaaacaaacaaccagacagcaacaataatagagaacaaatcttcgatcatggcttacaaaggggaaaaaagatctattcagttcatggctgtggctttgggatctgtgttgaggaacccatcaggtcagggaacaaaggtggaagtaaatggccaggaccccacagtcccctcattggtaagctccctatggtctgcaggttcctcactgcagcacccactaaggtttctgcccattgccaatagcagtgagctgggaactaagcctttaacacaattccttttgtggtagttaagatccaaaccacagtacatttgcttttaacaaggcctgttggaagtaagagtattgtgttccagcggatagattcacaggtccaattagtgagggagaattctcatacaaaaggcctcaaggctgattctgaagatgcctcctacttaaactatttcctttttaaggaggagtgttgatctgggaagactgtccttggagaggactgtgagtttattgccctctgaatcccagactatgtccctgtgacctgtttctgaatcatgacaccaatcctcatgtctctaggtatagacagttgtagagttttttcaggcttgatggctcatggtggaggaacctaaaattaaacgcattcagatgccaatatgtaaataaactgtaagtgaatcattaattattaaaaatggagtcactgcacaccacctttggatcatagcccgggaacctggatagagactggattcatctccaggatgaattaactgcagcatgggaattaaaagtcggtatttccaaaggaacaattaattaaacaggaaggttaactcacagtttatagactaagcatctgcttgttcagcatatgcaatgaaaagcaggctagtggtagatttataaaaatgtcagttagataattgattatatatacatgtatcacatacaagcagcaatcttgcataatttagtttttccttgtctctagtgatcttcactagcatactgatctagagcagttggtagtatttgtgtgccgtatcttatgattcagatattttaagttgaaagaattaatatgccttttatatgatgttttgtcactggaatttcaggaacttagtattttttttaattaattgaaaatgtctgtatgttccccctggcaagtctaaatactatttttgagctggggttataggtttgattgttttttcaagtatataatacccaaggattgttgaatttgtcactaactaggatttaaatgcatttattgtaacacaaagaagtgcacatgttactgattaattctttccctagtcatagtgaccattattctgtgggagcatgctattatttactttctctctctcctaaagatagttcctactgtaagaagtctggctcacatatgtagcatttcttgaagatgtctaaatatactgaagtgtgagagtaaaatttttaaagtttgaggtactagtgtggaaatctaagtgtgtcttaatattttacttaaaggaatgttaaattatttttctccatggaagtgtaagtgtgtgtgtgtgtgtgtgtgtgtgtgtgtgtgtgtgtgtgtgtgtgtgtgtactcagactagcattaatgtcttgtgctaaatgcccaagaatacaactcatttgcagaaaggctcctccagtattcccagtgacaaatgatttggatggagaacttgtgaataacgttaattcctttagaatcatctcacccttcagggatcacttctcaggttaaaatgtttagttcccaaatatagtaaaacacttacctgtaattagaatatcatgaacgtgtgaaacatttatttgttcaaatttacttattccctgccccccttctgagaaatgtttaaaaagcactttacaaaaaggaaagacatatatgccatgattaataaataggaagaactagaggcaagttagagtgttaggataagggtgataaagtaggaaacaatttaccagctgaactttgagaataataagggcattgagaacttaatatttaatacgagcctttactgtaatttggacacctgaaagccttgcttgttttccccacttgaattcctgtcttggtaatactttcagtgccattggtctgatatcgtcccaacccacttttggccaacttgaaggcaagattaaaatacactataagttatttgcagatgcaaagattgagttctgagccttgtaagggatagtctatcagtggaatgtggcccttgtaagggatagtttatcagtggaatgtggccctcagctatttccttagatccgcagagggtttatagcatccaaagctgtaacttagaaacaaagggtttttacataaaacttcagacttacagaaaccgaaagagcagcaagatatatggctcactttcccacatgatcatatagtatttctccgagacgtaggtggtatttggactgtatttattgcctggactcagggcatttgtgcagaccctgagtatggcagccattgctttgaaagagctcccatcttcctggcagtggtgagggctgtgttccatatatcaaacttgtctcttaatgtctttcttctgttttttgtttttgtttttgttttgttgttgttgttgttgttttagtcctcccttcttccttccagtagagaatacatgcaaagctgcacgtcgcatgcttaactggagatgatgcatcctcatcagtacctgttcatcacccatacatttatgattcattctggaacattcaaatcacggttactgcttatccaggttcagataattatgctgatagttgatattgtaggaagccccgaattctttggcattgtgtaaaagaggattgcaaatagaccacatattgtgatgtgtggtaatctctgatgtttagagtcggttgttggtttcagtgtcacatactgtaccatgaggagaaatggcttccagggtgtcagtcactcagtttggaacccaatgccttgggcggcagtgctcaacctacccttaagaaatggaatagccaacaggctcactatactgagaacaagagccaagccttgtctggagaagaaatttccatacaacaagaaagatcattgcaaacacaagactcctgagtaaatgagaaaagatgtattcacagggattcattcccagctggagtgtggttcattttaaggtcatcctccacccctctctccagattcctgcatttggtagcagagttaaactttacttttgatatgccataaaaggtttttgttatagaaagaggcactgtacacaaaaggaaatgttctgcacatttgtgacttgttttaaattaaagacgaaaaaagaaactatgacagatttttcaggtcattacttcaaacgccaacaaaatacaaagatccctccatttcaccacattcagttgttggtttctctttgaatgacttcaagaatctatttcttggtggatttactgtgcactggggtgaccgccagtatttgtggaatgtagtggtgttgaggcccatagcagcaggataggttgtagaagatgaagcaaggtgggttttagagatgagggagagaaaagacatcacaaaaaggaggtccacagacagcacaactggactgtggacatgtaacaaggagcaacctaaagtataggggctgcagtttcgaatcagccaagagcgtcaagaagaggagccctgtgggcacctggtacattctgtggttttgggtcaccagggtgcattgtcaaaaagtggtggtggggataaaagcagcagtatagacacagcttgctaaatgtgtccaaagtaaaatattcgcccttgaaaaaggcattcttttggagccagctctctacggtcattgaatagcttagccaattgacatttgagcttttgttctgtgtgtggtatggcaacgttaaattatattcgttgaaaacctgcaatgtctaaccactgcagaccagttttaagcttaattattttaaaacgaaaaagaattcccaccatccccgtcctattccttatctattcatcaaaggtcatgctgagtgatgtaaatagttctcttaggtaggtaatttttaaaaataaacagcaagaatctttattttggaatttgaagtctacatgtgattttcaaattaagtgaatgaagtttatggcatctgtatttttcttttttttgaacactaaaaatggaagttcaaagacataatttaacattgaagttggaaataatatgataggataaattttaatttaacttctaaaaaatgtctattcagtcattaataggcttgagcttaatacaagtcatttgtaagtacttaagctgttgacaagagttttgttaataaaaaaagaactgttttatcttgctgttatgttcatatgtagtattacatatgtagttgcatatacaagcatgtaatgttatgtctacccatacataattgaattggaacataacagcctttcaacgatggcaataatatttcagacatgagtgtatggtacctagtacataacatttcaagtggtaaggttgcttttaccacattcttaggtggtgacaaatctcattctacacagaagcttgtcaaactagactttgtgtgacctgtgtatactaagtagcacaagcacagtttctgtgtgatgatttaattaagtaacaactatctgattgattcattatttttctctgttgtgttgcctatctcaggacaaagtcaggaatgaacactactttgtatctatgatggaaatccttttgctgttcttgcttgtgtgggcttttggtagttatcaacaaaacacacagtgtgaacatacacaaaaggtcagataggccgggggtagtctcctgaagcctttgtagtatgagaggtagacttccagctgtatttttttttcaagagaaagccttatccaagagcagtgtgaggttaaggcaagggatggactggaagtatagtctgtatgtgtttagagatcaagactgaagtgtggcaacactgtaggtctctacatgggataatgaattgtgtttcccaaaggatcccactgtagactatatggtttttggaaaattgatcctaactgttgacaagcccagcttgactcatcccagcacaatagacttacttggccttccatagatagagaccctttgaggcctacttctacatttggtccattagagtggcttgttgtaaattcactttgattgtctttcagagctcactagaaaatcctctttttttggaaacctatactgaatcaccttttacttaactagacccaaacacttctcttgtctcttctcactgggatacttcttggaggcagaattgctgtggactagtgttgctgagcactatctcaccagtggccacatcattgaagacaatgacttcctttcactcagcagctgtcaattctagtagctcccctgaggagggatttgagggagatgagcctctttttcttctatgactaaatgtttaagggctcagttttctgcatggcccatttaggctgccaaagcagttgtgagttcatgtgtgctgtggccttgccatgcccttaagacacagaaaaactttctgtttgtttttaactctccctctccttttgcatatgaagtcattgtgtttcattaatgactactctctacatgctggttatatgcttgtggttgttttatccttgttttgatgcaatttcagacttggtagagaagtcacatgactagtacacaaattctcttatatctgttacccagattgttcaaataccttttcaatattttcctcatcatcctttgtcttttctgaactgttgggagtaagttacatgccacccatactcctttactccagtatagtttagtggctccataaaagatattttcttatgtgagctcgaaacacatccaaaactaataacttggcacgagtgcacagcattttgtaacatgtagacttcagtggtttcattgttgtcccctaatcagtctttacagtcacgaagtacatgagtggcagctgtgccactaccaccctgatcttaatctcattctctgacattatttctgcctcactaagctaaaatgagaccttgagacctcatacctgacagcaccatgccatgactttttctgaaagcctcagttatctccaggctttcaaatatgtttattagtaactcctagaatctgggacttgtaatggtagtagtttttgtaacattggtgaacacaaaatgcaattcttgatatcattcataatgcctttgttgtgtcctccagtcaataaaagtctcatttatggcattaaaattacgagaacccctccaagttgccagtgttggacatcagcaggacatgtatccaacagttagctgacattggagagccctgaattgaagagatgggtgggtcagtgctctcatcctcctccttgaagatggggatgatgatctgtgactccatcgagaaaaataatgtcaagggctgctctgtgaaacttttagttcatcatgtgcattgtcctataccaacaccatgatttacaactgccatgttctggctgtctaacaaagaggttagattgactaatgcgatgtttcagtgtttaggcctaaccaggtatctaggctgctgcccattttcatgtagttcatcatttaatttattgtaggcatcccaacgtggcctccagcattaaagagaacataatactacagaatgttcaacttgaaaaagaatttggcattgttcaaaggtttggaggacaattacaacactcataaaaacagaaaatgatacataaatcttttctacaggaaaatgttggcttatttcttaaaatgtttctattacttaataatatgagtatcagagcctttgttccacacataatgttcaggataatttggtagacatgaactaaagatcctttaaacaacttgcttttatcacaattcaattttattcctctattcaggcatagtgacattcatttagtgactttgttgtgggagcatttctttgcatgtaatatacagaaccactcaagtgtagtctgttttggatcattattcatctctttggcctttcttggatggaacaaatagagtccagttaacagcctcaagtcaaaaatatctgaaagacataacttgccttatatgtattattcaaaaaatgacttatttttggatatgctttagacagtcatttacaatagagttaggatgaagcattagcaacttgtgtctgttgttttggagggacagtagaggagaaacacaggaagagttccttgtggaaggtttcagtgaaagcctttgctgttaaggaatgtaaagaaagactacatttaaccacaccagtcactttatctctacttagagtcagtgtgctccttctgtttgctgttcctggctgtggtctttagtgtgtcctcgtctgaactgacatccttatgatgcttggccagaccaaagatgtcatcttaaggaaaatgctttaacagaggaaacactcaaggaaacatttgaaaagattcaatagacacaggagatacttaaaaaaaagaggcagtcttggtgttaggaaacaaggatgcaagaaaacactttcattggtgctggagaaatataaaaataagcctcagacagtagaggaacatgagtcagtaatgatatcacagtcccagggccaaatcctgaggctgtcacttttaccagtgatctgaccttgaataaattatgttatctgcctgacccttacttcacagccattccaggagcatctgaccttcattcagcaagtgtattttgggcacctcaactgtagcagtattctgccatgcactggagctatcataaggtagaatagcccaggctggactcatgcttctgagagccatgtaagaacatgtgtgggcatttattgtctggcacagggtagcagtcagtgcattttttctatttctctttgacatctcagccttcatagaaaatggggaattcacacattgctgaagactgtagtgatactagtcttcattaactgcctcccaaacagaacctcttatcaggggttgtcacaagctggactgggaccagttagagatgtacttctatagaatctgtactgggctgagtcaccacacatgagctcccattccagcattttgaggaaccttctgctcttgaacagttcacttgatttctgtgggagtcatttctctcagtgacacagcaagttcattaggtgagctctcatcttttctggtcctactgatcttgtgtatattagctggtaccctccccctccctcccccccctctctctctctctgtgtgtgtgtgtgtgtgtgtgtgtgtgttgtgtgtgtgtgtgtgtgtgtgtgtgtgtgtgtgtgtgtgtgtgtatctgtgtcattgggtaggtaggtgggctcacctgtatgtatatgccagatattgataatgggtattttcttccattgctttccagttggttttttagataaggtctctcagtgaacctggaactcaatatttgggctagaatggttatgcttccagtccctgggatttgctgccccattgcagctattacagacacatagcactgggcccagcttttacttgggtgctgggaatcgaaactcatgcttgtcagcaagtgctttactctctgagcatcttctcaacctgtgactgtacttcagtttcccttcttaaatcagtgttaagtgtatgtttttccaccagtctatgttagttgtatgttttttctttttccatcttcagtcttcatccaccagaaggatttggcttcagtttctgaaaacttgatttatcatgtttcttcctattgacttatttcagggcaaatagtagaggagaaggagtaaagggaagtgataggggcagtccttctgtatatatgtttctcatattggttaataaataaaacactgttggccaatagggaggcaagctaggagggactaggagagaaggaggattctgggaaatgtagtagagagatggtagccatgtgatcccaggaagaaaggacacatgccactggcgtccatgataagtctttataaaatatatagattaatggttatgcttgatacttaagactgagctagcaaataagaatcctagtcattggccagcagcattgtaactaacataagactctgttatttgggggccctaacatggtgacagaactcaggcggctggcagaaagagttattgttacagggaagctattcctgactgtatagtgtgtccccttaatgaaatggcaggaaactgagttccccattctattcagagaatgcaggaggacgaggacattatatggtaacattattaaccaattactgctttaagttgtagccatatccttaagtcaaacaaaaagtagttaaaaacccaaactgaaaggacattaatggtcggttgggaatggacaaagctgaagtcctagaaggagaagggatcttagtcaacatgtgcccttgactggcagtcaagctagagcatgaattcaaatcccagcacagaactcctatgtcactgttacagcagcttattttcatagtctattcttcatgcttattaaagcctcttaggtgaccagacagcacatgtctccttttacgtaaagatcacccaacccaaggcctctgttgtctttatcctgaagtctcttagccttttaaggatgtccccagtatctcctttattgacaactttagtttctaatttctagtgtatcatagaagttctaagaaaatctgaactgctctggttactcttaactccacacacctcgtgtaattttattgtttctcagtaaacgtaacagtcacttcagacagtttttaatgattcacagtagcacagattctgtgtgtgctagtgctctatcactgaatcaaaatacctgaggtgatagctttaaaaaaaaaaaagatttgtgaatctcactcttggagttcaagaccggtggccccattacttttgggtgtgtattgaggccgagtgttatgacgggagcatgaggcagagggagcctttcctccatgccaaagtgaatgagagacagaggaagagtcccataactccgttcaaaggggtgtccctaatttagttccacttgacaccatctcttaactgctcctctgtcacccaacagtgccacaggctggagaccttgacttcagcaaatgggcatttggaggagtagttaagatttaaactattagtgtcaggcactttcctttagaacagttgttgttcccccatataccagagggaaaaattgggatttacacagttctgtgcttctgaggacatccaagttatgtaaatggtaatcccaagagttgaagccacatggtatcattgcagaggctgtgtctccctctaccctgcttcccccagactcccatgccactccgtcagcatgcactcccatacttactcttggtctggtgtagattccctgtctgtccatatccctaaacactggtgattctgaattctaaccctttccgttatctcaagccagatccctgacagtctcactggcattgaacactctgtacttactgatactcccagagccttgttcaaggccctcttcttggctttcttttccatctgcctgtctgtggttctgtcttgacttcatgcaggtggttcatagttcacttgttcaagaccaggtaatcccttaggtcaccaagtggaggcagggactctttagagatctttgtgattcttctttgtgagaaatcctagctctatgtcagaagtatagagctgaatactgaaggcagtttggttaacatttacctgtaaacaaataagtaaatattttcccttgtagaaaataatgtgatttttttaaaaatataaagacagatgacatttcctctccattggcattcaaggacatgcttttgtcaaaaaagaacactgaagagataatgttggaaagagccaatatgccatgtgagagaacccttcattctgtatctgtcaagacaatggtgagggacacactcttacagtgtgagtaaaacaagcccatggcagtttctgtaagttccaataaccaagtacatccaactacagtgatgggttgaaaaagcaaccaagatcaaaatttggaatgaaattcccttcactcccctagtttccagctgctcggctatctttggtttaaacagtgctatttttgtcaggatacagcatctctttgtttcttttaagcctgggctttgctttgcttggaagtgttcatctgggtttaactcccttctcttatccataaatttttttgttgttttcaaataagcctttcactttgtacaatatttcttgcttcccaatattatttgttccttgctcataggatgttctttgccatctaattttagatcacacacaatgcctgagaaacagcctctttttttggaggaataaacaccatggttaagatgtcacttctcataaatcagtattggagaagatgaagacagctgtggtaggggagagggggccaggaactcacgaagtctgaccctttcaaagtcgacttaatcccccctcttatccctgtctactgcactcttggagggtggaaaggccctctttaacatgaagaaatgagcttttgcattgtttgcctttgtcacaacaacaaaagctctggaaaattccaattaattagcaagccttgggctaatgaaagaataaaaccgaaagagaaatactctgagctttcagagaggcataagcatgtgagcacaatgctgatttcaaatatttggggctgtttgtataattttcccagggtttgccttcctgagactcatggtgataaaacgcaagagacaagaacaaggatttgtcagagttaggctgcaataacatcactggcttttaaggacactaaatgacccaccatcgtttgaagaaggcagttaaatgtgaactcacacactcagggaaattaaaaccagaaagtagggctttgtgcatttgtatttagaggaagacatgaggattagatgaatgtaaagaagattatgaaataagtttagatttaattattatgaggaccaggaaatcgctatactgttgtagaaccaattgaagatttgcacttaataaggtttccagacatggatggtgagtgaaaaccacttaagttagtcatttgttgtcttcaatattttatacatattattattatatcaaaatcactacaaagtaacatattgagagtatctgttctgggtatacttctttcattttttttcaacagtgctgtgagaccttagactctatgtgttgatatcattgaggattttactaactctactttcaactttgttcatttagaacatagaggccaaccaagctcctaaatggccggcgcacatgtgttagtgatagacccaggtttgaatctttgtagttgactttcagtgtcttcagcctgtaccatcttaccatgctggctatggaatattgtttaactatgaaggtagaaattatactagggacattagatattaccaaatgaaaatagaaacccatgagttggcagctttatccccagcttgttgccacttatttccatcatcatgggctaatcatttatcatttctggcatgttcatttattaaataagcttgtctgtttggatgatagctaagatattttccagtgctaacgtgcaagtgagtgagaaaatgggtaaatgaaatagcttttgaggtgtgcgtgtgcttgtgtgctctcgaaatgccacagcagcatcagatccaagatctaagcatacttatgttcacacgatagcctcctgtatgcttcagggaacagtgctttgtatttcaggacttagtgtctttcctttcctcatgaagataatggcagtgtgtgcatagggtctctcacatgttaaggtgttgctcatatctaacctcatctgggtgttgagtgtgggatagagggtttctacttaagcagctggatccagagaggagattagttgaggaaatatatcttgataagatgtgtagatatgtttgtatggctgaacatttgggtggttggcataatgggtgagacctaaatgattgaactctgatatgtctcctgttggtttacttcattgagttatttacttttcctcagtcttatttcttgggtattttattggaaatgtttttcagaggccttggaaaaggtggcattgcaataatgtgtttgtatgtaggttgaccacacagtgaaccacccacaggttcatactcaaaatgtcagaatgtgattttattttcaaatagtctttctaacattgttaagttaaaagatgacatcatgctgaacttcatacaatgctggttgttattataaaaaggagggaagtttggacacaggcacataaataaaataagaatgtcacatgagtaaagaagacacagaatgggagatgatgtgatgacagagggagagactggagagatgtgggggaggagtgatcaagtctgccagcaatcgctggacacaagaatgaaccaaggagccctttagagccttcagagagtaaatggccagcaaacacattaaattaggcattctggatctcccaaggaataagccctgttgcccacagttgcctgcattgtgcaactctttgtaagcttgcctcaggacacttaacatggaaagaaagataccttgcttttagttgggtttgcatgacagggagaaagacaagtggacataaagagagacaaaggaaaagtatgaaggggtatccattgtcattatagtttcttgttctgggccatgtagaagctatttttacttgttgtatgctcagaacaagtgtttggaattgacaaaacagaatttgatgaaaggttgacttacaatcttctaatatttgactttgataacatgagtttactgtgagtaacaaggattaccaatacagagatactgaagtgttatccacatagtgacggttaggagacggtcccattaccttatttgtcagtttattcaaatatgcttgtgacagcatctgcatgatctcagaaacaaaaaaacaataactgtctgtgaatattagctaagctatatagtggactgaaaagttccttagaaatgtacttttattcggaaatggggataaatcttgaaatcctaatgagaaacaagtctcagccacctaagaagtaagggctttacagaaagcaacagtgatagataataagacacaaccgtcaagcagacttgggctatgtggactcagtttgttccagaaaagctcagagtgaagacagctcgtgaattctgtcatcaggcagtgaggcctgtatcgcatgtcactttgctttgtttttaacatgtggctcaagctatgccagacctgctgctgtgtgggagatgtactttctgacaaaataaggcatttttctggcatcagacccctttggaatttttactggtgtgcataaacccagcaagcttgtatttcccacacatatccaatgtagtcactttggctttgtagatttataatggtctcaaagcccgtcagagatgatgaggtcttcatcatcaccaaaagttatttagaggaaatgaaaccgggcatcattcatccattattcaaaatttgcctcttatctaccacaggcaaaacagataggccaaatttggaagcactgaaatgtgttttagcatggaaacgaaagtattcctaacaggctgtccctttttcctctttctcgtcatccatcatgataatgaagttcaccatgagagttcatttatattactttgtgtttggagagttgatgatggtgatgatgatgacaatgataacatgattatgaatattagtgttcattttttggttatccactagtggttgagttgaagaactctttaaacaaacactaaggcaagaacaagcaactctgagcttcctttggaagccctttctgtttatattctgagctcctactccttgcctccaaatgtatttcaccattggccactcaaaggatcagtgaaaccacatggaccctcgcagcacaattcattgtctctggtgtgagaatagatggagaagccttctctggcatggaaggggctctagtgagttgtcactgaatagaaagaatgaagtgtgacattgcaccaggggactgagaaaggtaagaaattctacagagtgataggatggtttgctgagtgtctgtcattcaccactttgtgagatggcccactggggtctttcattgaacccacattgtggactgtggacaaggtatgggatgatgtactagaaatgtgaaccccagtgagtcacaggccccgcttgctgtgagactagtctgtagagtcgagtccagcagattcacccagcactgatgctcccacttctgagtcccttccaccttacgggcttcctgttcatcatgcaaagtcagtccaacctcctggtctttacacttatccattttctagtcttgtgactcttccctcctcccctaagttcttcttcagctgtttttcttctcactattttcagctcagcttatgaaccacaagttttacctgtgactccacctacagtcattattctacctttgtgtgacatttcttttctggaccttacctgtgtttgaagtgatcttcctcatttgtccattttcttgctttagtgagcactgcctttgtgttatactgtaaggaagtagcagaggagggatctttatcctcagcagtacattgtgagatgactggatggatggaagaatgaatgactggatgacagacgttctgtagggcaagtgtgagccgaaggacaagttgctgggtgacacatctggcagataaacaggtgaaaggcgtcttcacagaatggacaatgaaggcctgggaggcaggagaaggacaaggtcctgctcctgtggttaatgctttttctcattgctcctgacctccccattcagacacccctgcccctggaattcagtccagacacctcctcagtagggtgggtggttaggttcctggaactgacccctgccctctttggacaaattgaaaaaccaaagaacacatgattattgaaaacagtctgtagtgctatagaaagttgcctaaagtttgtctttccaataagaaggaatttagaattgatgtaatggagaaaaggagcttatgaaacataagtaggcattcttgacaaaataaaaatagaagcttaaaagatgcctcgtgttttggaagagaaaagaaaggctctttttccccttctactgtaagaaaatatgtgtggatgaggcgtgcatgttaaactatagaataaaatttgcatattacttcagggtattgcagccatggcagttggattttgtcagtcctgatagacacacttgcaatgtacacacccattaacaagattatcacttgaagagacagtcatatttctactgaacgtgttcttcttttttgaggataaaatttattgatacttaatgaagcatgaggtgtctaaatgaaccatgaaagcaatagctaaactaattaactacagataaaggctcccggcatacatatggtgatgtgggccgtgtgcttatcaatcgtgcctggttacactgacatctttgataacatactccttatatgtgctttggggaagcgatggtaaagtctcctgtaatgtgtgcactacaggaagcaacaaccatttaaatacctgcaaatatggataggatctttaagttaagctccgtggggttaataggtaataatttggtagagttaagaagaataacggtgatgtgctatttccacacacttgatttacattcctatgctgtttcttcagtgacaaatcactccctggttctaaaaatattcattttcatacttccccttctctcctgtcccaaagagagaccaaggatgctaaaaggcatgatgtgactgtttttttgtacagcaggaattctcatgtggacccttttcaactgcatacaaatgttagatggtgtgcaaaatcaagtcctgctttgacagcaagccatgccagtttgtgaggcaggcgacttaaataaacagaacagttaacattgacatttaccacttcagtcagcgtctccctggtcagtcagtgtctaggcataggcacttctctccacaggtattgcagatctgctgcttttcagcaagtggattatactcctttggtacttttctaaaaatactcatttataagtgaagggatctgacaaggcctgaagacctgtagtatgtgctagtggcaggagtcagcactgtgacagatgtttgagcataattttgcaagcttagttgtgcatcattagtccccaagggcttgaatataccaacatgattctccatctccagagtttctgatttaggaggtttggggtggggcctgagaatttgcaggtctagtaaactgcttgatgatgctgatgtgtaccatcccatgtggatgctaggaactgaaagatgtctgtcctaatagttttctttcctaaagagtgcttactatttttctttcctaaagagtgcttctgttcttttctaaggtatcctcatacataaggacagttctggaaaccatcatacgagttttcttaggaagacataaagaaatgtctgttcaccctagactattgaaaccaaagcaaggattctgtccaaatccagtttgatgaactagtgagtttgtcggggttacttacaagatcatgggtgtctcaatggttagagcactgggaagtttgtcagtttccagaagactaagctactgaataatcacatccatagcatgggtaactaatgaagagatgcacgactgcagattcctctgggcaactcaggagctactacaggacctagggtgctcctgcttccagtgagttgtttccttcttgcagcgtgatagggagaagaaggcctttgtgagggtcttgtggaggaagttgtgagcttcttcagcctccctgcttccttttcagtgagcatggtccatgacggtctcatagcagtcatcagcagctttctttcaagtctgaaggaaacagattcactgctgcaatgtacagggctaccccctttagcaagggcattaggtgaagctcacaagttatttcagatcattctcgtgtgttgaaggttttagggacataaaattcagccaagggatctgcttgcttctgtggcaactgtgctccagtcacctcgcaaatgataccatttttgcttcatatttctctatacctaatccagaactcttacacaacagatgtgtgctccttgtactcagtgaaatgataaagcttgtgtgactctgcatctttcctcctattcatgaggaacaatgctactagaaaagaaagacatctcatgataacccataatccttagctctaccaagttcacctcacctgtttctgaggtgggcttcatatgcttcttagtatattgatggaccaacaatggataggaatgggaagggaagctttgcactggtaaggattgagactccattaaagaatgagaagagaggagaggaagaaagaatgggggaatgttgggaacaatttatttcctcacatgggagagtgaggagaggctttagtatggtgttagactcgtgaatttatttatttgttcttttgatacagggcctagtaaaccagctggtctgtgacatgccacctccttcctcagcttccttagtgctgagattataggtgtgcctcaccatgcctaattggacttgctttttgaatatgctacttcatctttaaactggaactgatagagtccgagttttatttggactgtgcatgattaaacatgttaataacagatctgggtctgaatgctcagagggtgaaggcatttgctgacaagcctgatggcccaagtttcatctctggaatccctatggttgaaggaatgaagtgactccagaaaattgtcctctgacttccatatgtgggaaagacacacacacacacacacacacacacacacacacacacacacacacacacacacatactatgtaacaaaatattgtatttctaatgttaagtaataggaaataaagatctggattagtggtttcaaagtagagagtcgaaaagagcttgagcataccatttgggaacttgtagataacaaatgcttagcttgtactccatccacagggtcagatgctttgagggagttccagaagttgggtctttgtttttacaatctgtctggcatgctttgagaggcaggggaagggggaaccttctgaaggaacagcagctattgtggctgatcaagttctacaaggccaggaagacttctggttaacagattgctggtgggtaatgtctagtgtgtaggatttccccactacctactgtatttgaaaagcctatgaaaacagggcattgtgggaagtaagtataatcccagcactcaggcttgagtaggaggactaagagatctaggccaggccaggctgcttagtgaattctgggtcagactgggctgtgcagtgagactctgtctcaaaatcaaatcatcagctacaacaatggaacaaaatgaaaaggcctataagccagaaacattttgagctcagcactgaaaacaaaggggtaaattactgagctgggaagaagaaagctaatgaagttaccatactgcacaactgcatagaaatccaagcgatggctgggacatgagcctgggaaagtgtcttggctgctgccgaactgcccgtgtactgggtcagtgactcccaggtcactggctgcaggactgtgcttattctcttgctttttatcttttggcactaacttgctagcatgtgaccttgttagactttacctaacattatattattatttctttctttaaatagcattttgcatgaaaaaaatcaatgtctgcctgttggctgtgagaaattttaaatactgaatatagaataaagtaaaatgacctcttagttagtacctcatagatgtgaagatactagtcattaatattttaagatagagatttatgtatatgtattatgattttactctcaatgaagttttagattctagggctggagagatggctcagaggttagagcactgactgctcttccaaaggtcctgagttcaattcccagcaaccacatggtggctcgcaaccatccattatgagatctggtgccctcttctggtgtgcagatatacgtggaagcagaatattgtatacataacaaataaataaaatcttaaaaaaagaaacagttacgggtattattttaaataaaaataacatattacagattcaaacagtgtgttatgagcttccatgtgtacttcagtgttcattgaaaatatatatttttaagttcagaagaatttttatcacatgtattatactacactttatcattgtaagaggttccttcccaaaaggtttatattacacattacactgtcagctcaacctgctggcagaatgttgtctgtttttgtctcatctactgagcccttcttttgggagctatttaaatcctaaaattcttgtcattagttttgatttataaaatcctcttcatataccatctttaaatgctttttttatgtagaatggtagttgtttcctagtctcttatttgctttttttattctgtttgtcaccctgattaagccaatatctttttttttgacttttttttatttgaattacaaacaagattgaattacatgacaatcccagttcccttctccctcccttcctcccctaccaccccccaactaaaaccctacctatcacatatcctttcttctaatctacacctgactcaacctttctgctccctcatgacctctgcatccttcctcttcctcccttctcattcccatgttctcaatttgctcaggggatggtgaccctttccccttctccaggggacaaagtttgtctcttttaggatcctccttgtttactagtttctctggcagtgtggattgtaggctggtaatcccttactctatgtctaaaatccacatatgagtgagtacatatcatgtttgtctttttgtgattgggttacctcgctcagaatggtttcttcaagttccatccattttcctgcaaatttcaagattccattgtttttttctgctgagtagtactccattgtgtaaatgtaccacaatttctctatccattcttcagttgaggggcatctaggctgcttccaggttctggctattacaaatagtgctgctatgaacatggttgaacagatgtccttgttgtatgaatgtgcatcttttgggtatatgcctaagagtggaattgctggatcttgtggtagactgattcccattttcttgaggagtcgtcatactgatttccaaagtggctgtacaagttggcactcccaccagcagtggaggagtgttcccctttctccacatcctctccagcataaactgtcattggtgtttttgatttgccaacatctttttttatagttacagtatttatctttgtgcatcctaaatgaagtaaaaattcaaattcaaatacattgcattttagttgttttgtattttgtttatattattttgctctttattttcctgggattgtgtttgccactgatgtctgaagtcataggtctcatttcctgtgatttttctggtttgcgactgttaacccatggccaggaaaaagagtctgtttctctagccttctgaattgaggagatatgtcttgagattggtgtggccagtggcaaagcagaagtggctgtgcctgttgtaggcatgcttttttctttttttaattatttagtgtgtgtgtggggggggctgtatgtgtgggtgggcatgctcatccatatttatatatgtggaagacaaaggttctcccagaatcagagactggtgtttcagctagactggggctctgaggtcagatctgctggtacatcaagcgcacccaccctccagctatctctcatttacttcccccatcccaaccagtgatcaagcccttaggcatggttcttaaatgatgagaacagctctgctttccagctcttggaatctgcaccatgctgggagaagcccaagccatgtgtcctggccacaagctctttcatggccccaagcgaacccagtgctgacagcgaacatccttcacaggtggaagtgagcaactttagatatccatccagccttcaagttgcagcctagctaacatctgacttcagtgtcctggaggattccacagaccccattgaatcccaagagtcacagaaggcaataggtttttttttcctttaagaattctgagagacatgccatgctcagccttaatgtatgggagataggcctagccctgcctcagcctactgtgtcagactatgttgactcatcattggagcccttacccatgaggaggagtggactgggtgtgggctggggtggggggaggtggggtggggaaaaggagtggtgagaggaggtgtgggagggagaaatgtgttggaatgtaaaatgaacttaaaaaataaaaatggcaaaaaaagaataaaaggaatgctaagatacacagtagctttccgccatggcaatagatgatcagcatatttataatgtaaatgtgaaatcagctttgatttccccttaagctgtgccgcacagttgcccttcacttttattgatccctttccttattagtttgtaatgccctcatgtgctaattgctgtgtatctgaggtcacgctcttatgattctgccatgtgttcatttttaaggagtgcttttcaacctcttatgacacacgatatacctccctgcaattaaacatcagtaatgcagaaacagactacattaaagtataaggtagtttagaagaatcaacagtttgctctatttatttttcattcctaggaacttgtatatatctgtatttgtgtcttcatggaaacactgtagcattctttatgttacactcgatttctagggatttaaaattttttgaattatatttttgaaatttgtaactgatagtagatgagaaacctgttgttaatgtaccttatgttgtgtcccgttgccatattggattttattttcttttatagtaagttttaggaaatcctgttgggtcgtttgggtaggtagcacttctgaaatttaatctgacaaaaagagttaatgtgatgtttgttcagacaatgttcaagctggaagggatttggtaactcatttaatccattgtcttcacgacttaagagaagctaagtttgtgccacccccatttcacattcagtaggagtgtgtagcagacaaggcatctccattcttctgctgtgtttttagcagccagtcctcttgacttcttccaaagataagagctccgcgcatcactgagtcctcagtaccttctgattctagaaagttctttctgtgtttgagctgcatttctgctttctctggttaagaggcacggggggggggggggagagacacacgaccgttttgctgacttcctaagtgccattgttggaggttctgatggctgcggagaaatctgcgttacttgggggttgactgggtgagataaagattttgaagctctttggttgtttgttttcatgtaagatccatgtgaactggacatctctgaaatagttgttgaatgaaattgaatgttatgtgatgtttctaagtttcctaggcccatgagcaagcatttgtcttaaggagaactgagtgtcttcaccacaaatgtccattttctgtctctaccagaactgtgcctgctggagtgtaagagcaggttaactagggacagttgcttcttatgcttcattaccaggcaagttctctgccagggggctccatccaaactcagtgaggagcacttccattatttcagactcctcaaggcagagcttttctttagagcaaagacaaaagaaagtaaggtcacaatgcagaggaattccctgagtccataactgctaattggatgattgttctgcaattcttacgatgccaggaagtaagagccccctagcctcacccactgcttgtaaacttcctttgagatggaaatcttttaaaaaattatgctgtcaagtttgatatgctcaaatgaaatcctttctcctcttcttagcaaggggcttactgttcccgagtaacctcgaggttggctccgcggcacatttacgtttggcagagaactcaccctgccctgttctgctgaaacctgtggttaatcatggttctactccaacttcaggcttaagaacctagaagcagattcaccctggatctctttttatgaaatgttgaagcgaagcgagctcagttccttttgcctgcacagaggcagacacttgtctgatctgtgggagtaaaggcttttgaatcctttgagtttgaagacaaaaggagtagagagaaatctttctgggacactgttcagatcccacgtgcactcttaaatagattgatcttgagacactgctgtaatgtaggggtctctgttatttcattatttctcttatcctgttccctcctctctgctcatgcctctcttccattagttccctacctaccactaacacttgtaaacacactgctcactaggtagattcaaccatctgctctctttactgttttgatggtgaaaggtgtatttaaatgtctccgacatgtttggcccagtacaccccactcagaggtagcagggtctagtagaagaaaactagttcacttgggtactggggaacttgggctattgtaaatggattgactctgctattaatgttttggccaggcaggcaccctacctctttgtatttgagtttcaatgtctgtaaaacaaagaatttgtatacattatatctaaccttttcccctgtacattacatttagaattcagagtctagtgggagcagagatacatctgtttctcatagggaaaccttgtaattgttttttttttcactaattctagtcttaaggtagcttttttaggttatgagaatttaggtttttcagctgtgaactgcaggaatgaagggaaattagtattcattgagcattgggttttctcggggccaggaggtagctagtttgatatatggtgttgccaagttggttgaggtgattaggccagattcattcagtgacgtagtcacagattaaattgtactcgatgacttcactgtggcaaggtctagcctctatactgcttaggctgccaccctgtgcccacactctgtcttcttcatggtagggtttgaaccggatagtgaaagcagagaacattgtgtttgccaggggctgtctctgagtggtcacactctactcttactatgatatagttgtagttctacaagaggaaaacagagtttattgagggggaatttttttaaagacctttaagctagctatatgtgtagtgttttcaagctatgttgtctggaagaaacaggttttatcaaaggtcaggtttgcactgggagttgttcagttaacagtatttacttgttactatgcttggtacactgcctgtgttcatgcagggctatgtgtagggcatggatgtttgtacattgctgaatccttgtaagttgtgtgcactcaagactactgaatgaataacaagccagtacgtcttttctatgcaaagacttaggtagatgtatattttctaaatatcatcatcatcatcatcatcatcatcatcatcatcatcatcatcaccaccacagctatgaccacaaccatctctgccaccacctctaccgtctcctccacctccaccacctgcaccacctccaccactatctccacaagtgtcacctctttctgttagtgtcccaacaacctttttgaaaatcttactttagtaataattttgtgctacaattatcttgattcatttcacttggcagttggattctgaataatgaatgaatgacaaaaaaaaaaaaccatgtggtgttatgcatcagaaattctggaaataagagagattgcttactagacgtcaccatgttccgtagaggttatacttgtgttaatctgtgtatacatggacctgacaccatagattctattctccctgttcctccagagtatatttagatgccattcctgactgtggactatacgtagaaggtgagttgttgaaagttaagtttgtttggtctatcgcagagaagctggatttctgaccactatttgcccttcccacatggagatgcttgttcagttgtgtcagaacttatggactcacacatttgtgtgcatttttcacttgagctacttggcttctgtattgactagttttaagtcaacttgacacaaactattctgagaggagggaacttcaattaagaaaatgcctccagatcaggctataggcaagcctgtaggacattttcttaattagtgattgataggggaaggcccagcccatttgtgggtgttgctatcctgggctggtagtcattggtgctataagaaagcaggctaagaaagccagggagggaaagtcaataagcagctttctttcatggcctttacattagatcctgcctcctggttcctgccctgtttgttctgatttccttccattctggacagtgacatggaagagtaaggcaaataaaccctttcttccccaaggaggaaccagaacaatagcaaccctaagatagcttcaaattcccactcctagcaagtcctgagctctctgagccgtgggttttctcttctgtgaaatgggttgataatattcagagctgtagagttagttgaaatagagagccaccaagcaagcctttcattaatatcagttcttatttttcacacacaaatgagtcattattattcgtcacattattataacaaatgtgttcgtatgctgccagccaggtcctctctctacatcccttgtggtccctgtgctatgagagggagggggcagggaggtttgcttcacagaaaaggtgatgagtccaacactttggaaagttctgcatccgtggggaggtgtggagtgtgcttgtggggagtgaaggccagtgaggtgagaagtggcctggacaactagaagaggctgcccagctctctgccacccctagtgggtgtttcagcaagcatccaatttcacttttgttttcatcccactttaaatagtaaaatcctatctcccttttgtcctctgttcatccatttgtaccaaaacatgctctaggcatggggtggccatctcctgaacgtggacattagtgattgcaggaagctgtggcctgggctggggttagggagtgggggattgagctccgtgggcagattaggcataatctctaactttgcctgcctgctacttaaggggggaggtaacagaaagcttatatacagtagacctgatcaataacttaataaaagatgcataaaaacagtgcgacctaggggatagaagagggataatgcactttgaacttgggatagaaggcaggaaaattcattttaaggaaggggtgacaacagttgttctccattggcgggaatattggggaatcagggatgggctagtcacaggaggttcaggaggggccccagctggagtgtgtatgaaggggaccctgtgatgaggtgttcgatagagctgtgagtgcagaaggtctcaccccaaatcagccgtaattagtaagattttttcctgaagccattttctctataacgagaaggaggagggggagattagatgcacaggcattcccagccttaaggttaaatgttaacttctttgtacagttaacaactaactcagtctttctgcaagagaaaaaaggagagagagagaaatctaacgccacagtaactacctcactttcaaaaaaaaaaaaaatcaaaagccctacttgcctgtgtttatgtggttgcttgttttccacgtaataggtttgtagctcttgcagagtggtgtgcacatttgaacaacagactgtagaagcatctctgtgaattccccatgtgtcttctgcaggctttccagacagttagctattttagaacacattcctagttcagccattagaaaattatgggttttatttgtataaactcagcaactaaaacggggtttgcagaaaggtgggtgagctcaccgcagtctgctctgacccaagcaagttaatgacctgcccagcattgttccgccggtctgtactggctgacttcaccagcagttccacttgaagggagacattgtttctctggctgcatttgtcagaagctctctgctcccggcctcttagcagttcctgaaggtttgtgctgcctgtaatttctaaaacctcagagcaagtggccctgggaatgtatgcaaagtatgcctcgaagcctgcggagacccccagcaaacagtgtgatgtaaacacctctagacccatgcatgtgcccaagcagacactgcctgaggaagccctactgtgggaggacctcctgccgccagtaccttgcagtgcagtggctaaggagcatgaataatttaagcacgaggtgcctttgctgatgactctgatcactgttcagaaagaatgatggtaatgtatagaatgaaggtaggtagaggaaggggcctgggattgcagtttatatttgctgtaaatatgaaatatacgggatgctgaacttttaaaacctttaaagacattacctacatagtatatacacgttggtgaaagaatgactggccaaaggagattaattgcagtggccttaaagttttagatatcaggcattaagacaggctggctggaaaacatggagtggctggtaaaaggcctttaatgtggtgtgagattgaagtacttgactctgaacatgttgtcacactcatagtggaatggagaaagaatggcagtgcagtttttaaaagtcaaagggaacattgtttggaatgaatacaaagtcagatccttggtatctctatcaaagcatcccagtgtaccccataaatcagtattgttactatgtgtcagttgggaaacatcctgatgacacacttcttctggcctgtcgtgaggagctattggattatcctctcatttgctgtttatctagagaaccgttcagtctttttgtgaggagcatgaaagatagaagggaacccatttgataaaggagtgttggaggcgagcgtcctggagtgctccatccttgctggagagagagaaaccagtgtcaggcattgtgtccacagctgctaatgcagaaatccatttgccaggcccaggtgacttggataagacttcattcttctgtgtctgcgatcgcattcttgcgaggattgctgctgggtagtgttgcatgtcagagatgagggagggttagttattaaccccacagaggggagagaggggcaacgggcagctgctggaatgaggaaagggcctggctgaagcatttccaaaaggtctttttgttgtttatacttgttaattattaatattaattattgatgaaaaacggttttgagttacatgccacgcattgtttaggaatgaattatcacacttattatctggaactagagtagatatcaagctctttcaagtaatccatatttgttccttttagtaagatttttcttccccttcaaacgctaaaaacaaggatgtttgaggtgttggcttgacgagtctgttttagggacccaggtgcccttccccctcatctttgggaggcttctaacgctaagcaacacattaagaactgaattagaccacagaaaggcaacaatttagagaggaatcgggtacaaagtagctgtctcatgggagatgggtgctatgtggctgtgggaggtagcattgctgcatttgttgagcactgttctaggtctctcttgcagaagcccttccaggcaggtgctctggtcatctaagtctgagaacaggtgtcttcagagtttctatgtcatataggttcctatgtgttctgctcacattcagaggagtgggagagttagttcattggatgattgaagatcactctggaatcagacccgagctggcaaatgctgctgagaaagaggagtgagaagaacaagagaaaagtggagagagaggcagtaggagggaaggtggagagagttagaatgtggaggtatctgtcagaatgggaagtgaagtgaccttggctctgggaatcaggctgtaaaagctggtgtttatgcttcctaggcgtttggggctttttgaatgctatcaggttgacttaagcctgattcttaaagaactgatgtgctgcctctcccctgggctttattgatttttcactttagattgtttcgtgcctgtgcattgtctcagtgatctatcatagcagtgtgcacccagtcatagcactggcaagcaagaattgaatcacctctaagggtaggttctcttttgacaggctggcctcctcgggttattggttggtgagctttcccacctgggaaatgggagcaatgtctccaaggcagattaacaggctgggataggtcatgtctttgtcatctgaaggacttggccattacccttctctgtatcgaggagtgtggtctgcaaggagttgatggactgtgtctaggaccacaagcaggttcactaggaggcctgggagttctgccttagctatgcgaaggttttagtcagataaactttgctttcagtggctgccttggttttgagacgaaaactctgccactgtgaaaaaggacaaaacaggccttttccacagttgctgccagctcttggtctctccagagaggattcctggtagggacagttataaagaacaagtaacgcttgtaaatgaacacagtgttcttgcttgaatatttcccataattccaaagaaatataatacaggtaaggttttttcatgttctcactgtgatatatatttatgagaagaaaaaaaaggattaaatactggaagtttttcttatcagtggcttaggcttttacatctctcaggttctggtcactataaaatcatctagtttcttgccctagtcacggttgatattttcccttctagagacctttgaattatttttattcataagtgaaaaatgtattacagctttatttccttttattaatagttcgttcttgcccttagccactctctgacttcttggcatgcaaaagcagtgagctcatgcttaatcatgtataaacaaccgtctaattatatggttttgaattttcatctgaccaactaaacagaaatgacacagaaacgagaaatctgacagcctccctgtctcagatacctggcctctctctccctccctctttcttcatgtgtccaggagcacgcatgtttcaacttatcaaaaaatcagtttgcatttgccaagtttctgaggtaaaattgttcttttcaaggctacgtgtcaaagaacaagtctgtcaagcggaattacacgtcttcttttcatacttctttcaaactattctttcctcctcaggatggaggtgttcctaacatccctcttgttgctggtgtcagatgacagaataacactcagggcaggtttcctgatctttgtccccttcccttcacttctcaagtacagtaagaactcttccagttggccttccctcctttaactcctctggaacattttattttttgaaagaagatggtgggaaatttttatgaaacaaaggtgttctttctgtttagatagacatggaaagaagttgaccatttcctttgctttctcactgctagatacagaattctgaacacagagcaaaaactcttggatattttgacagtttcaaatggattgttcagtgtgcttgatggcaaaagagagtgggggtggaggggcataaaaaaaactcccactgagagacaagaccttctgatatgtggaatctacagtagtgggactgaaagaggtggggtggggcagagaaatactagaaagtttcatttattgcaggatgaatgaattcagatccaacacccactattagtgactacagttggcaatatttgtacaagttgacatttatcatgaggctagattaagatattaacacgcatacatgggtaaccttgtgttatgaagtatatataaactactttgctgtgattattttaatacacactcatgcatttaactaccccttgcactttaaatatatgtaccataaacttaacatattctgagctcaactttgtggttatgtgtgattttgaagatctaggtatttcatcatgtagtccaggctgctcaggaactaggtatgtagagcagactggctttaaacctagtagtgatcttctcttttctcaagggcagggattgcaaactgtgccgctacatccagcaaattatacattatatacttcaaatttaaatactttctgcttgtcagttgtactctaatgaaggtagacaacaagaaaggaatgctttctttttattaaatttgttccagatattttgcaacaggggtatttcaaagataagtctgactgctgtcatacaaacaagaagtgagggtggattcttgtgaaatttggtcaaagcaacatgtttcttcattagtccttcagcttaaagcataattcgacttctcagattttttttttctgaaaaatacccatctttaaacagtaaaatttcatagacttaggtgttttagtttcaaagcaaagagactccagcttgagaatttagagttggcaacctcttgctgaggtttaatgtctgatagttggatgttgaatgctacacattgaaaatactctggtaattctgtcccctcttcctgtttaccactggaagctattcttactcagtgaccataaggtaatatagttcatcacaaactgtgaatttctttcaatagcccccatccttttctggtacaaaaaaagtgagacttttggcccacagttgttagttttgttttattatggaacatttaaggcagaaggacacatatcttgggtcacatttatctaaaatgggctcacctgcagcaggacagaaggaggtcctccatttatcaccttcaggactctacttgcacaatctttgaagagctggggaagaatttcatatctccccttaattactctgaagggcatgctgtcctaaatgccctaaaatgtgttatttattcttttctaagaagctgtgcattactaagctatcattctactcttactctgacttttagctttggtacgcaaattcagatgagtaactaagactcctttttaacaagtattatttcagggagaacctaagcataactcataatttgaatttttgttttccatactgacaccaaaatgtcataggattgttttatgttcttttggtggcactgtgaattgtggctgctgtgtaagtgctcaactgctgagctgtatctacactacgtttctttcattagaattaaaattgttttatatgtgccaggtgttttccctgcatgaatgtgtagcactggtttgcagtgcccgttgaggccactggagggcgctaaatgccctggaactggaattacacaggcttttgaacggccatatgggtgctgggaattgaaatccagtcctagtgctattaacttctgagtcatatctctagcctgtgagtgttttttatttgtgtggatgtgttcacgtgtgtattgtgcacatgtgcccgtggaggccggtggtcaatatctatccgtaactgctttctgccttttttgttttgttttttaaatctcattgaacctggaactgactgatttggatagacgagcttgaccagcaacccctgggtagcttcctgcttcctgctccccagcaccgaatgtaggaaccactgtgtaggcttttatgtgtttgctagggatcgaactctgttcttcctgcttgcctgacaagcactttaccagcgaagccatctccccagctcctgcttttgtgtttggatagagtttgtgttgggtgtagtgctttccctcttagccaaacccttaatggctgggagttactgctggcaagatggctgactcagcgtgcaccgggcacaaggtatgaccatcacagccgctttcatcctgactcgagttgtatatagagttgctcagattatgtttctcttctgagttcacagataatatcaaatgaaagaaacaggaggtaacttacagtatgtgggcttcagccaggttgcttgtgagttgaggtttgtgatatttgaatcttatttttatattttggtagtctggttaacattgcaacattttatacagggatactgttcttacccaaaaggtagtagtttcaggcttaaaattacagcagtaattttaagtgaaattgtagttgatgtgacttaatatttcatctaatagatctataagaaacagttctttgaataaaagcatgttcgctcccaattctatgtttgatggaatatttagtcttagttattgttgatgaggtaccttgatattgtgtaatggcgacaccctagagacagcagaaaatgcaggtttttttgcttgttagatgtctcctgagatgcccatggccccggcccttgtgttgtcttgggtgacaattcacaaaagctagaagctggagccactaagcagcttggaggcggcagctcaataggttggagagagtgtcctttctgtgtgtctcagttggtctaaagctcttccaggtagcttggctggtctgagaggaacgcttggccttcattgtttaccctcctggagaggaggccttgagactctggtcagtttcagggacttcctgaagcttttttgagttgtttactttcctgcttaaggagctcctatgggatggaatgtttcaatttttgaaggaaagtgttacaaaacaaaaggtcattttatcccatgattatgccatctacttctggagcattcccgagcctactaaaatctcacacagtgcatccatgtggggtgctctcctccacgcagacagaaaatgagaaaactgccttgtggcatactttcggagggagtatggacagaggggcaaactggtatttccagctgttgtaatgtagaagctggacatatcactggtgcctaccaggatcctcgttcttggttatgatgactcatacctgtttaagagggattttcttcactttatttgtggcttcagactacatctgcttttattcgttgtctacagaccatgctctttatctgttatgtagcaaatatttaatgagctatggctttctgaacagagagagggatcctacccattgtttcatctggtcactaataggtgacattgcaattttctctggtaacttccgctttggattagcttgaggagaaatagcacacttaagagatttatggctttgatttatgaaagaaagatctggaacctcctgcacttgtacttgtaatcctcctcatttctcctctccactccgtctcctctgatgagaatattgggtttgtgccgtcagctctgcttggctctttgtagaccttgtccagagatcataacagtcttcccagcttggtttctgccttctgtttctgccctgcctccacattttctgaaagtggttgaactatcctcttcataatcaccagcatacccaggcttgaaacccactgtagctcttgtgcctggacttggaggtgtgctgttattcagtaagaataggattcccaaggcttatggtgtacttactgtgtgctggacaagcatgggagtagtttgcatatttttgcatatttgatttattcaattcttcaaacagctttatgaaggtgggagcagttttgactccattttccaaatgggcaacaaaagcacagagagtttaaggaacttgcctatggtcatgcagtttgtaagtgaatcctctctggctccatctacagcacttgcaatgtctcctgtgtgacttttgcagtgctttcttagcttttgcctttctcctctctctggtcctctcattattcaccctgttttcccgggccacggagaggctgagtgagaggggtgtcacctttcccaccaagctaatatagatacttatttttttgtatgtattcttttctgtattcaatatcaaggcaatttaattcaggattggatgctgcttacatttttctctgttagtttaaactacatcaagtcttctagaagattttgcaaaaatcttgtgtcctgatagcctgagattccatgacacatcacagtgccaagtccacaataggtcaatgtgactagtcatggccttgggagactaagacagttttctccacctaaagtacatttactctcattctttctggtgtgtgcaaatctttttctaagtaatgctatcttcataacatttctacagttgaatctagtgtacaggttttggtataaaccattgtaggcaggaactgcctgacttgtcttatgaacagaaactccgttgaagcatctaatatagctaagaaaggtagacagataactgacctacaagcaataaattactaaattgagcctgtgctcaaatttcagtttttgggagtaatgatttgcttatttaacaaatacatccgatctcttcccgtgggattgttggaaattttgtcaaggggaaagcagtaaaatgtgcttatatttcctctttggtttttgaggctaattgtgggtgaactttatttagcactcttgctatactaagtgtctctgtggaccagagaggcttcagttaacttggcaaatcattacaagggaggacaggagggtcagcagaagccctctctactaattagttgataattgatgtataatggctgagtgatgggactttagaatgtaaacctcaggaacaatgttgaatctatcttttatttttatgaggtgtctgggagctatgaattctttgcagtatcttaccagaagtgctcagcagtgtgggaagcaagacgagggctgatgcccagaaagtggggttacttagaagtacagacaagcatagaacaattttcaatgtcttaggtataaatgtgacaccatttaatataggcataaaataaaatgagtagggctggtgattctatactttgtgggcaacattcctgtaatgctgactaaagctggaagcatgctgatgtaaaaattatacccttgtgaaataaagagaatcaaactgaatccctgaagtcatattagtagggtattgtacaattcatagaactctccttggggttaagatttgacctatttattgctacactttgggaaggagtcacaggatagactttatggaccacactttaaacttaggcttctgtaaccattgctttctgaattttcattgcccacactgggcctttttcactgtctactttctgctttctgtttcacccatggctgcttgccttccccatgtcttggagagtttactcttgggtggactcctagttgcatgtatcatctcttctagcatggagcctccagtgtcggacagccagttatgtcaaagcacagagcccccaatgtcagggagccacttacgccaacgtcatctggtcagtgggcccagagcggagtctagaaatttcaattttaaggaaataacccttgtgatgctaacgtacagccaggtatggaatcactgatggcatgaaacgtcctgctttaacatcggattgtgtcagctttctgttcatataacttaaggtaattaacctccaaagagaataggttattttgccttggggtttgaagacattcagtacacagtggttccattgctcatggtgggtctctggtaaggtatcaggtgagcgtgttaacacttgagtaaacccatttggaagtgaaaaaggagaaggaggagactaaggcccacaatccccttcaagggcacactcagtgacccaaagtctcctcttaagccacctcctatgatttctatgagctcccaatagtttccaggtcccaacaatgacccaggtcttttggactaactgaactgaccccccagaactctagctcttcccttgctttgtgctggagccacctatgacaggaacccttctcccgatggtttacttccatagctgcagcctgttacttctttttcatccatgtgtcttttcttcctttattgttttaacttactaactcccgtagaattataatgttactctttgagtaactccccaaggaggaagagcccctaaaaattcagtttccccaacaaatgtattttgcctgccatttgttcctctgaaagattattatgtgcgttgtaagagctatgagaaaccttgtaataaaaatatgtaatctttgttttattaagttattctgaagttgtttggccatgggcatctccagaagctttttctcttaccacttaagtgacacacctttggaaattccaaaggactttgaggaatgtctctaggttaatcatcttcaatgcacagtaactgctctctttcttcttccaactcctgtctataatttagctgcatattaagtcctgcatagcgcattagccttatctgatggctcctgggtgagtctgtgtgatgtcagtagattgtcagctctgcaatgagaggatgctgtacccggtgtttcttatctcccacaggttgtgtgtagttctgtacacttgctagtgctatcattctcattcctatcctttggtgtttctagccattcatccagcatttctggatcttagagtgacacactgtacactcatatatatacattcgcttcatagccagtgctgtgtgctttagcagggagacatggcatacttgtccaaacactctacaataagaattgtatgttttctatgcatgagtttattgtttccagttatcagaagggctcagaggcgatccagtaatgacctggatccagtgggcagtcatcaaggggcccctggagaatcttgtccatccatctcgggtgaaaatcatgtgcttttcaaagttctctcgggcatctcatgctttccccatctgagaagagagaaaggagcttgcacaagttatgtactatattatgggtgaatacccatatttcatttatgacagggatttgtggtataaaggtagatttatttcagcatttgctttgagactttattaaaatagctatattttcgtggtttctcttaagaacagatgggggcaatgtatgataaaatatattgctttcagaattagagcatacatattcatatttgaggaacttaagacatgtggaaggatacacatttggctgtttcagttgagtcctcttaaaagaattttgctgcaactgggcagatatgaagatgtcttggttttatatgtacatctacatcatttgactttaatgcatattatttgaaattagaaatgtaaataaatgtgatctccaaaagaagtcactagaacaatctaagcaatgcttctatatgtgctagattaatgaatctggggcctaaaaatacatatgcttgagtcctaaacatagtttggaacctatgggggttgtcatggtacatagaccatttctaccttatcagaacatccttttgtattgatagagggtagattgcggtggaggatatattgtaagggcagagttttcagtgatatccccaatgctctttctgccttggctctagaattgggccttcttgcccactctgcctggggccaccttattgttacatatctacctggtaaagcttaccttgtatgagcatctctgtccctctggctaagtttatccatggcagaaagccccaatagtttcttgagccacattttcctacttaatttgcttctacattataaaaagactgggctgtacctttcttagagcacgaggaattagcaagaggtgttagtacttttttgagttcctaataatcatttctgccattatgactcaatttgcattacttcagaattgctctgtactacagtgatgatcatcacagcacaaagttttgactgagcaaagagtgtgtgtgttggtacttggtaatcctttgagataccttggagaggaatctgaaatgttctgctgactactaaatggcaaaggttccatcttcaagctgcctgtggaggacagccaccttctcccatgcaatttgtgtgcttttcgaagtagtatgggtcttcacttagaggctagagagatggttcagtggttaagacactgaccgctcttccagaggacctgggttctaattgccagcacctacatagtggctaacgatacctgggactccagttccagggattgagccctcttctggcccccatgggcactgcaagcatgcagtacctatacacacacgcacacatgcacgcatgcaggtttaaaacagttctcaagaggtattttaaaaggagttcttttttatattgggcttttctatggattgttttaaggaaaccatgtcatgcaggggtatttaagtgcttggaactagaaacagtggtaaaatttttagcttcaaagttacaaaaatgttacttcagaatgacctagattggtttccaactatgcctcaattttgtgatcaccaggaacaaaggaaggactagacttgcaaaaactttgcttttgcagtgaaaggtttattgagaagtttaagaaaatactatttctgggaccagtgaggtgactcagcagctgatggctcttgctgtcattctcaacagcctgggttagagtccctagatggaaagtgagaactgactcccagaatgttttctgatttctgcatgcaccccatgacatgcacacctacacatatgcatacaactgcagacatgtgcagacaagcaataaataaataaaggccaaagataatacttctgcttttccttgcaaacttttgaatattttttaaaatcagaactaggaaaaatttgaagtcttcttttctatttctgtactattgctttgttatactggaggcatttcacatgagattaacaccttagtcctagacagtcagtttctttctgaagcagtgagctgaaagaggatgagagaggggagtcaagagtggtacgaaggtgtaggccatcccagggaggactgggatggtgtgtgtgtgtgtctgtgtcatgcactgtgagatgtcagcattggtccctcagtacacaagggaaaagaaattctagaaaccatgtaaaatagtattggagacagttctttctcttatttttttattgaaaacattttcatattatattctgatcatgcattttctttgtcgttattcccttcctacttcttcacgcacacaacttcatgccccttctctctttaaaaaacacaaacaaacaagaatcatacacagccctccacccccagatacacacacacacacacacacacacacacacacacacacacacacacacacacaccaccaccaccaccaacaacaacaacaacaaaaaacgggaacaaaaatatacaaacaacaaaaaacagtaagaccaaaaaaggtaaattaaaggcccaaacaaagcaaaatgacacagaaggtctacagaaaactaatactgaatctcttttgccttggccaactactcctgggcatggggcctgccccgaactgtgcctcatttacccaatgagagagactgcatttgagaaagtgaatttttcctttgctagtgggcatcaattgcaggtagcttcttggtgagcagtgtgaggatgagagccaggggtgcttctttaatgacattgagttaatttgtgtatgtgtttgctagtttatgtgtggacttgaacatggaggtcagaggacaacttgggatgttgttttctcaaactccatcaacttttttattttttattttttttttgaaaagtgtctctgactggcctggaacattctaagtgtgttaccatagctgattagtaagccttaggaacctgtttgccttcaccagttctggaattacagtgggacctggcatttttcacacggattctggtgtttgaactcagggcctcacatttgcaaggcaggcacttttagccactgagctatcttccagctccaaattcagctcacgttttcaaagcatttagtaagcgccacacactgtgtcacacagatgagctccttcatccctcttaacagctgtaccactctgcagcaataaattcattgtagaaccaggaaacaggcacagagagcttacacaatgtgggacgattataaagctagtgggtggtgaggctgtgatgcagatgtgtgctcttgactctggggatggtagcctgtccctttctttctttagcctttcaacttttctgtcagccttcagtgctctggtatcagtgatttttactaatctattcttggagactactggattaaaacttttctttacactttacactatatgaccctgcatcagaaagcaagttgctctacatgtattattggtaatatgtgagcataattttctttactagtattatagccttgctgaatgctttggattttataattgcattatggtttatacattaaaggattaaaaatatgaaatctatggcttattcttaatggcctcagaattggtatgagcaaactcttgagttcatatgttagatgaagaaatgaccgtaggtgaagttggagattattttcatatttctgcatcctttttaggtccttaatgttgcatagagagcccagatgcttaaatgtaatggtgtatatattgatattaacctgttgttattaaagtaatctcatgcattaagtgacatgatcattcctattttagaagaggctactagggcagagagatcccaaggactctgcctattgccacatagccagtgagagcaggggtcaggacttgaacctatcctgtattcatgtttttgccttaaaatgccctatgtgtgagttgcactgaactgtctagaacttgatcttctgtaatcatttgttacctgataaaagctatttcacatgatccacctaggggcaagaattattttttataaaaaacaggaagtggccttagtggggacttagtccatcccttgactactgcctccatggacgtttttgtaagtgctagttgattagcgattaagaacagcaaagctttgattacgtcagctctgccctctcatctgtgttacatttttgttgcgctctgtatcaacgtggattttaagagacccaatgagtagacataagtagttaggaaagatgcaacctgcagttaggaaagatgcaacctatttatgatgagcatgacctaatcaaccttggctttgtagaagactctttcaactaatgaagacattcgtgaaaatcacagcgcttctaaagtgaccactcagtttagaaactcagagatacagaatgatttgggcttcccaccagcacagggtgatcttggctagaacctatgtggtactcaaaacaccagcctctcagatctttatttgagcagtaaacacatttttaaatacacaccatgctgtctctaaaaataagcgatatttcaaaaagaaaaccagtgcccaagtagttggcacatctggtagtcagaaaagctgtatggtttgtttttacagaacaacaagccagggaacattcaaacttggccagttgcaaacttctatctgtgatgacacctggcttaaaaaaaaaattggctctaggctcaaaacagaaagaacattggaaatgggcagagaattaaacagcagcatttactatcttgttttgagcaaggaattgtgaagaacttttcttctgtaatagactggaacagagaaccaagggcaggcatgaaacagtaccatgcgtgacaatcgctgctgacatccatagtacctactgtggtgctgagtcctttgtatgtgctgttgctactggatgcaaagccaccttgtgaggcagcatcgatttcttttcttgtttggtagatggtaagatagaaatactgactctaaatattcagtaatttgccttggtcccacaaagagcctgatcaccaggcaaagctgctcccagagtccacactcttacactgagtagcttagagctgatcctttctgaaaaagagttagacttttaatgctttgttagtagtggttcttgctacagctcttgtttacttccccttgtgagatagatggtgccattttctagaacattctcagtgctgcatacaaaaactgcatgtttctgagaacttcactgttgacacaagctgtcactcttttgtggctagaggatgtttaagttggtccatgtgtttggagtagggggaggaacggtgcacagtgatggttactgggcagagaaggactgaggtgtcttcattacgggaagtctaggctacagggttctaggggaaagccttggtcagtgccacactctggaccaggagaacagatatacagttactactctcaccagtttcgtcttccattcagcttggtcagctacactgtggagaagcatcaatggactgactgcatttggattttttaataatggtcctgtttcataaaagagggcttccatgaaaatagttgggtaacattttaatagtcattgtagtcatttttaatttccatgcattcattcacagctttataataggttgggttgttaggaagcagataaatgtttaagaaggacttcgtcttttttttttttttttaaagatttgaagcataaaaatgagagatagtgggaatgtaatataataggttcattccctgacatttgaaaggacagatcactcagatctgcccacgtgaaagtgagaatagaaggcaggtccttacctttgggttgaaaccttgaagatgtggtctctagatacataagttacagacaaaattgtgaatgaaggtttgagtcaaagttgcagttatcacatttggcagttgctaattcgaagtatacatgttttcattgcatttctgaagtacggtatcatacacagatttaattggcttttcaagtttttactgcatacacacacacacacacacacacacacacacacacacacttgtttaatattataaccaacataataattggttgttcattcttttaatacatatgtgtatacacacaggattttagatttgacaaataggtatatgatttgttattgagttatatttcttgtgtgtactgatagagtgactaatgtatttgtttttgaggcagatagatattaatagctttattaagaaaaaaagacaaagtgacaattcattctatcagagtatattgcattctctttgaatgcttgacatctgatgtagcttttactagaaacttatggtagcagtggtgaaagctgaggagataactcaggttatcatagcctaggttagtctgtgcaccactgcattgccttttttaaggtaaagaaagagcatatgcaaatatacaggattaataactttcagagagcctcattttatgagtatcatataaaaaacacacccaccactcatgatatgaaggcaaaaccctgatggttcaatgccatttttgtcagaaatatggaatatctccaactggtcttggaagacacaagaaaatggatcagaaatctgcagcaggagggagagatgaacctgtacatctgaaaaaaaatgtgagaaatttctttaggagccagtgatcttggaaaatgttcaagagagggcccagagcccaaactaaagcatgtgggtgccctggaaatccatggagggattgtgttttcatagatggtaattccctgtgtggccacaggcaggccacgagcacctgggtttgagctccacggcattgatggggcgctcttgtcaccttacatagctgtgaccccaccagcatcattgaggtgtagcttcatttatgaggatatgacaatagcttccaggtctgttttgtctcaaggggctattagtagaaaatgtaactagaattgatgccaaatcaaagagctgtttggtttaattgggggaaaacaaaatatgacattttgctttctagagctaaagaaagttacagtgacaaattctacacaccagtcccaagtagagtgatgacaaagtcagagaatctagtgagaaatttatttttatttgttagaattgggaatagagtataaggcactggggctcaaacaggtagttgtcagacatgtttgagaaagcacatccatgcaaagggaatgtctagaatgactcagcttttactgttattttaaacaatgattcatggcaatgtcagccatttcttctccactttcacttctctttaatgacacaaattcttgtgggtttctatgcctttatttctttctcctttgggtatgtaccacacttttatttttacattggaattttataagtaatggaaacaaaaaatatgttgttaaatgaatttaaccttcccaagtgaatgttttatggatttcccatcttgaattgaaaaaaaaaattgttgtttgtccaatggcaacttactgggatgaaaagggaaaacctaaggttaaagggatatgtcttgattataagtacagatttgcaatcgaattggctaaacatttttattccttctccagcagtattgactttacttgctgtgtgattcaaaatattagctactctaggaaggagttgatttgataaagatgattccatctactagacacaccttcacccttctgttaaggatataaattatgactttcagcatagttttcaggaggtgattctcgattctacactgtggtgttgagtggcgattatgaaaagccttatagcgttacagcttttgccttggaatcatgtgctttatggtgtaatcaatattaaagagatattcttgtaacaccagcacttgggaagtgggaggcaggaagaacagggactcaaggctatctttgactacacagtaagttggagggcagcctaggcaacatgaaaaaatttactgaactgagaaggtccaaggactttctagatatgagccccgatgtaaatgtgcacctgtgtatgaattgattgctgatgtaagggacgtgaaagctaacctgattcatttgtttttaggggctcttggctttgggcctcagtgcaagtccattggaaaaggcagctgcaacaatctagtggtcaccagcagtcccatgatggttcagcgactgggacccatttcacctccagcaagccaggtctccacagcatgcaagcagatcagtcctagcttaccgagggcagtgaatgcagccaacctgaatagacctccttcagattccaggtctcaacttacgttttttttacctcccccccctttccttatggtatactcataccccatgagtgttgtccccgcttttcctgaacatgaatgtacttgctcacacacacactgactcacacactcactgttcatgttcactcactctgctgaagcagctcttccagtttcagctttgtaggagaatgtgtctgaaaagtgagtaccattcttttttttttttttttttttttttttggttttcgagacagggtttctctgtggctttggaggctgtcatggaactagctcttgtagaccaggctggtctcgaactcacagagatccgcctgcctctgcctcccgagtgctgggattaaaggcgtgcgccaccactgccctgccgagtaccattcttaaactcttaatcaggacggatgctgtgatggctattgtctggtcacgtgagatttgagtctctggaaccaaagcctggtttgtaaagttatcatttccctataaagcaaggcatatgtggccaacaagatgctctatacacctgtcaggttttctgggtgtgtattgcagtgtctcagggctggtttgcaaactgtcaggctgctaactcaacctgtgcactcatctactcaagcatgtattgagtacctactgtgtgggtagtacaacagtttagggaaatagtagaaagaatagagatggaagtcatgaatcataatgtgtttgggaagacataattttgtaattatgtaagcctgtggcagtataagtgcagtgataccttgtgtctttttcatttggaagagttaaattgaaaagaaaacactcctctccagacaaaattttattttcctcagggttgatgtgtgtgtgtgtgggtgagcggggttggctaaataaaagtgaactagggtatagcgtttaatgtatatttcttttgaagattattgttttatcttttagaggttattttcttggaaaaaaacagtgcagaagtttttcctgtgagtatcagttctgaggtgatagctcttgcaaaggagctattgtctgcatccttctgtgtgggctgtgaccactaaggtgccttgtggtcctgagactctgtttctccttttcccttccttctgctcatttattttctgggcctcctttcagcctccagttgagactctgaagtcatggctcccagatcacttatttattctggttttctttctttctttttttttttaaggtgaaaacttgttttctacctgagactttagtgatgggaagctgctgtcagtttcccattgatgattatgcctcaagggactcctcagccttgctgagtgctgcatgtaaaattaactctgatcattggtgggtgtcactggaagccttcagcttcctgtctgtggcaagtccatcccatgcctggaaggcagtcataattaatggagaaatagacgacagtaggcagaactcaggccgctcaagccaggtgtcttctgcagtctgtttcatggttcggccagaggggtcattatctcagtatttcctggcatatctggttccttagcataatatattcttaaaagacaacatcttgacgatgcactgacaagtattttgactgtgtattctgtgagcctttctctgagaatgttctcccccccaccttggatgggcaaagacatgggagttgagaaatgggttggtgaagtgaaggatggaacccacttatagcagtttggaaaggttgcgcattttatgtggtcattacattggtttgtgtgttccatctggggaataaaatcttgagaaagagcagtgcattgcagtctagcactaaagagtggctagtgggtgaaccggctgagcatttcatgcgtcaggtcttccataggtagatgggaccagagaggccatgaaccattcagtcttagatatgtttgccctttgaaaatctgcaaaggtgattgtttacctatggttgtataattgctatgtgctgtagaaaaagggaaactgtagaaaagtcttaggcaataaatgtgatcaccatgaatcccatcaccctgagattactgtgagtggaaactttataaacacccttcaaatccaagggaacacatgctctacaggtactggctttcctggtcatcaaattgactattaatagactattaatagacatcttctttagccttcatatcagtttcctcccaccccaaatgccattttatgaagaaacgacagaaataaaaccaattcttaccagtcctttattattaggacttcagttcttttttatgatttaaaaaatgataattatatcatttccctcttccctgtcctccctccaactcccttctttcaaattcatggcttcttactctttaattattattgttgcattcatatatgaaaataaatagtaaatgcaacctgctgaatccctttagtgttgcttttatgggtattctttaggtctgaccacttggcattgggtagcgatttaggggtttcatccctgggagagactaattctccctctcatagcagtcttttcttacatgtatctcttcatttaggatggtggccctgtgaaatttcccccatgtcaactggggttaccattgattaggtcttgtttaagtagccatgttgttgagatttcatgagggtaacttccttgccatctctagaagacacattgtttctgtctggtgcagtctttcatctgctcttctttgatggtgtaagggttaagttatagatgtcaatggcaactggacacaccgtagtaggtcgttctctgcttttagactagcagtggtagtctataagggtctccatctgctgtgaaatgaagcctctttgatgaggagtaaaagctgcccattcctgtggatataaggataggtgtttagaatgaagttaggaattacactggtttaggaaagtggctttgttatgttctcctctgagtctgtgaccgcactaggcatgtgttcttgactaggtttacagcacaagatatgatttccttcctgttgaacaggacttcagttcaattagatagctgttggttaccacctagttattagtgccactattatacctatagggagccttgccatgctgatcattgttcataggcatcaccatagggtaggacgattgcatattttcttcccttaatagcttacaatgtagctctgtctcttattttagtattacaaataatgctttattggattagcctataaatttgttatttcatgtctctagtgacagaacaaataatcaggagttgttggtttaaacagccattaatagcatctgtgatgctaatgacaggcatttttaggttacatggcagagaagaccaatccacataggaactcggcagtggtctcagacatgatcatatatttaattttatctatacaacttattagtttgagataataattgtgtaattatcttaattgatatttcattattgataatattgaacagttttcagagatttgccaactatatttctttctcttttttttttacttgatttgaatgtaatttttttctggggcattcttctaagagaacacgctctaccttttacttgtgcttagtttaatccagtgatgggaatcctgttttggtgctgtgtatttgctgtgatgaaattcccagtcatttctcattaggcaatcacagtgctagacaaatactgtattctgctgaggagtcaggagacactgtcagttttggtgtcatccgcatcctgctgtaaaggccattgcacatatgtctcttatttacaaggtagatgtgctacttcatacagttgtttagtatctcagcctagcatagctaaccagtaaaggagatgggatgctgtttagttgtttagtatctcagcctagcttagctaaccagtaaaggagatgggatgctgtttgtatgggctttgtagatacctagcttgcctagtgtgtccacatgccttgtgaatttgaatttaggattgaatattcacaatcctagcaaacgccatccctgttgaaaatgtggtggtttcaaggcatagaaagcctatttgatttgcccagtgtcagttttgcagcttgtcattacaaggtcagccaccacatagtgacgtcagtctagatttaaatactcttatttccatattctaaactggaattcttggtggtaattgccttttttgtttgaggtatgttcacaaaggtcagagaaggccaggaaaaggacctggaatatactctaggctccctgtgctctctgatgtcttctaaagctgttctgtgttcataagccatgctcactcttttggaagatttcctggggtacatagatgacaatttccagatagtctagggctggtctttcctaggatctgtgggtttgtggcacatatattatatactatactcctatagatttagttacgtacacacttcctatatgtacatgtgtttttccccgtgagcatcggtctgaggaattccatatgacctttaagttcaaacttcttttaagctttagaacagaacagctcaacttggtcatcatagctcttatggcttctagagagtacattttttactaatggcttctgagtttttcactttgcttttatttggttttagattcatcatcttgcctttcacatacagttccaaataaaccagtcaccagaaataatgtcgttaggttcagatgaacatatggaaatggagattgctctcagtgtggtgacacagctttctgagttctttgtcactttctcttccacaggcctggtgtgtgtagcagcaggggttacaggctagaatccttggcagccttcacattcgtttagcctactgtcacagaaaaaataatttgtgttgctgtcctagctagtgtgattttaagcctgtttttttactaagtctttcagtcaagcagagcattgtggaccacactggggtacattgtgaagaaatgagagtcggctagttttctgccagtcacttaccgtcattcagacttccatcacttcgttgaggtcacagatttttcgttattttctttttataaaaatatcttaagagtctgatttatctcataccatgtattcaataagttaatttataaaagtgctctataagctttgtcagtaatggctcatcagctgttgtgattatttttaggtattgattctgttctttgagacagatagcatcttgctatgtagtctgtgttggcctcaagtcacattcttctagcctcagcctcctgaatcctaggattggattccagacttgcatcaccaggctgggcccttccttctgtacttactctcttgatcaacaggcattttagtactttgtttgtatttaacactctggtaggtaccagggagataaacagcatcgtttccgatggaaaggccctgacatttatgagcacggtcctcagagatgcattacagtgtggtgcagatgacagagctgccttacaaggagatagatttcatgggctatgactttgaatgattaggtctcctaaagtgcaccgttgagagacatggatagtgactgccatttgttggaagttttgttcctattaggcattagggggagggaggagtgtgagctagctctctgttcgtgcctttgtttttaagtagactattcagtttgctatctgaaaaagatttgacaactgccttggaaaacagatactgagacgttaagcagtatgtctgcacaaggatatactgtgctatacattaagccatgttcagcgtagtttttaaaagaaatgagatttgcctttcattattgcaaaaatgaacatgtttctctattctgccattgagccaaatgatgtagctttatcagcaatgtgcatacaattgaatgagctactctggctgttagtcactgcttaaaagtctgagatgttctaaaatggctacctcctgggaacagacacccattcagccatggagccctgtcagtgtgctgacatcccatagtttcttggccttgtgaaaagcagtctctgcttcatatacagcatgtctgatgatgtagcttgtgtctaatgtaattcctgactctcacggaggataggggtcaaaaggctcttgacatccagtcaccaggagccttctgctgagctctgcagcaagagccacgtgttataagtgtgcttggaaaataaccgagaagtgtccatggggaattaaaacccaaacagttcagagaccactttggagctttcgggaggactttagtcccaatgtaaggatgtgaagcaagaagcaaatctatgtcaagggcagttggacataggttcctgctgtgtttgtcattggtaaacattaccgcacccaatggcaacttcaggtcgattgcagtgttatcacctaacactgtgcttttccagagcggagatgttttcttgacagtatccaaggcttggcagaaacagtattcctggtttccatttttttcggattagtgaacaggtgaaatgatgcttctctcttcctttgcttcctttgcaacaggttgatatttaacaaccagagacagtaagtgtgttcatgtagggaagtcacacatttttcatgagaattattggtgattaatttatttaaatagaagaatctagaaagccagttgcttcatctgagtgggaatctcataccttttctctttgtctacatgttgaccttctgggggatgaatgttttgtccaagggatatagcttttctctttttaaattgtttttaaggcaataatgtccctggaaagcaaaatggattttcaaggagatagagttatcattatgaaccactttaatatgcagacaatgaattgtgacatatttagcattttttttgtaaatggtaaggacagggaaggaattgttataaaaatgaaccactgcaagtgaatgacctgttcttggccttgcgctgctcagattcaaggacaagagctcatgggaaacctatctaacaagtgtggttaaaccccacatggcctgatgcatgattccaaatgcagcttttcagtttgttacttctttatgcatagtagctttgttctattgagggctatttttttgtgtgtaacaaagggtgaactctgtgcctccagcgtgctaagtatgcactttatcaccaaggtatgccttctgtcggtgtgctttacattttcacaaattttctagggtcatttgaaatgaatgagtacttacttggcattgtaaattgctatttaaaaatgtctaatgtgataatatcattgacactaaattgtaaaattattattaagtctctagcatttaacttggagatttactttaaaaaaatcatgggcttatatgttatcttcccaggtagatttttaactgaaatctagtattgttcagaattgtataacctgaacgcctaccttgacatggggtacacagtaggtgcttaacacatactcatttggtttgccaagacaaggacctataactttttcccagtccccaattcccccttctatataaaaggagatactttgaaataagtgaggtctattaattctcattaaagtgctagagttatttataacaatagctctttcattgttctagtaagcattagcttttattgtttgtcttggtaaaatattatttacctggaactagaagccctggattttgtcacagtctaagtgaagaatgtaacgggggaaattcttaagagattgccaggccagtgttctcttagctcttaagcaatccacagctctctgaaatgtctgtttttcttttttcttcccccttctctttggctactgctccagatcccttattttgcaagagtctttggtatccacgactttgagtctgacagagagtcaatccgccttaagtgtgaagcaagagtggtctcagagctacaggactttcccttcactttcatccaaccacggctctcagaatggcatggacctaggggacctccttagcttgcctcctggcacgccagggtccagcaacagcatcgctaactcgttgccaccctacctttttggcatggaaaatagccactctccttaccctagccctcggcactcagcatccaggtcccactctgcccgctccaagaagagagcactgtccttgtccccactgtctgatggcattgggattgacttcaacacgatcatccgcacctcgcccacatccttggttgcctacatcaacggatcaagagcctcccctgccaacatgtccccacagtcagaggtctatgggcatttcctgggtgttcgcggcagctgcatcccccagtcttgtgcagtgtccactgggcagaaaggcatgctgttggccagtggaggacaggcactgccaggctatgtcgaggatgatacactggagtacgagcgcatgcagcagctggagcatggtggcctgcagtctggacctgtaaacaacatggtgctgcagccgggcctaccaggccaggaaggccagtcagccaatatgctcaaaaccgagcgcctggaggagttcccaggcggtgccttggacctgccctccgcgccacctcttcctcctcttcccgcgcctcagggccccccacccccataccatgcccacccacaccttcatcacccagagctcctgcctcacacgcagccactggccctggcccagccgggcctggatgaggatggggagatggaggactcagggggaaagcactgctgtcgttggatagactgcagtgccctgtatgaccagcaggaggaactggtgaggcacatcgagaaggtccacatagaccagcgcaaaggggaagacttcacctgcttctggactggctgccccagaaggtacaagcccttcaacgcccgctataaactgctgatccacatgagggtccactcgggggagaagcccaacaagtgtacggtgagtgacttggggtttctaaagcactgcgccggctttcttggaggcccagcttgattgcatgcatgcattttaccaaacacaggaaacagtttctactattatggaatttggatgtgtggtggtgaaagttacctgtaaggtggcttgcctctccatctagctgggaccaggggaaagtttctttgataactggctgccgcgggtttctctcacttctagctcaggctccaggccacaatggtagtggaggccagtacaccttactgttgtctgggaaaatttgggtggcacacaggctcagtgttctcttgactatgtggatgttcaaaggcataggaccatgtgctgtgccacaagcaagcttttgtgctttaccaaagaaaatgctcagtttttttccctccaaaaatgtagttgagatttggggttcgagaagaatgattttgacatttaagaaaggaattcgtttaagaacttgcctgctgacattgttgcagcatgcaccttcataccagcacatggtacctttcagaattgtgaaactcattaatgattttgagcaaggaaacatcaggggctaccacagaaacagggtcgcatgggatctcacctaattttgaggaaagaggattttacggaaaagcacaatgacagtgggctgtgtgcctttggtgttgaagcacacgggtcttctgtctgtcctgcctctctttttctcaacatggatcctggaactctgattctgtttcttggcaagattgactgtttttgaataatatgattcctaaatgctttcacaacagtttcacacctcacagaaaccctcagggcttacaagcaggacttcaccccagggatcacagagatagctttgcacaatctgagatggctcactgaactctttgcaaaaaagaagaacatatgttttctattagtctagatggacaggaatagttcttccgagttggaactgagaattctgtgtattcccttactattgagagttccagagatcagcgatcgagcaaagagtataaaccagttggaaaatgaacttgtttgaatggtgaccttccaaccagagtaatctctttctgtatgtgatatatagcatctggactgtgtttatgttcgactgtagattggccagacccggattcatgcaaaagcatctcatacaggtgatagcaggaatgaaagagttagaagcactttccaccatgctgtaggtatttttgaaagagctttaaggctttctggtggaatgaaattgcatttcttgtcattacattataccccatgttgtgatttttttcttaaggaaaacctgaagctgatgcattgtgagcatgccaggttccatgagtgaaaagaataattacattccaagaggccaagccgtacgtactctgtcagtagggttctgtgttaaaaatgccagaatgagacaagcgattgaaggcaattccatttactctgtttggaacacaggagcctgttgcaaacaggaaagacatccagtctccaaaggaaaacagtccaaccttttagttctgactaatcctggctgaaaatagtttactggattgggttttactgaaataaacatgaaagtttgaattatcaaaaaatactttttttgcattgcaacatttatttttatgcaaaaggatttccccatttttgcctctggtcccagagttttcaaagtcacacaactttgcagagttggcttttgctaacgtgcatgatgaatattaaaaatagaaagagttgagaggaagaatagctgagaggtgagtgtgtgcagacttgcactgctgctcactgctccattcaggatgggcagatgaggtcattctgttctcctaatcagccctctcctcattaataggtggtacttttgcaaaactctagtttatcaaaactagaatcacagatggctcgcatgctgtggttcaaataaagtcagacaaagaaaagtttcttaggagtaactgatgctataactccactgtggagagggtatgcttttaataggaagacaaccattttcgtataagcttacacatcatgaatcttctgttttctgttatgttgctgcatgtcatgtgcttgatatgtgggcctgcagacaacatggctagatccatgccagctaaaataaccatgctcttttggaaaggtgctcttcaggttgtggtggaggctaccaaaccgaggagtagtttaaattctaaggccagtctatattcatttaatgtatatctgacttctattactcttctatatatgatctttggacttcgtcatcattctcacttgctgggatttttgaaccaagaaagggaatggtgaccccatgtgtttggtgaccatgactacaagcaacacaaaaaactggaagttatggtaaaaggagggtgtgtcgggactgaggcctgctttacagtaagaggctgaggtgcagtcctctccacatgccaagttccctttgctccatgggagaatgcatcctgtctatcatttctcattgtgactttgcagactaaccggaacctggggtacagatcactgaggattcttggtggcacagccaggggaagatgttgacttcattgtttggttctgtttctggaagaaaaggatgggtcccttctcggctaagcagccctacccttcaccagattacattctgacaggctctatggagtctgtccttaaagtccggcagagacaatggcaaagttttgaaaagcaaaggcgtctgtaggcagagaaacatctcttatgagtcagaaacaagatgtggcaaagttttaaggcacccaagtccttccatgcatgtctttaaactagtttctaggtgcccactattctctttctgccatcttgcttttaaaacagctctgtctttggcaaatcttgagttgctgactgttgagcattcccgagcctccctgagatgatgagatgcctgatttcaattccaagaacaagtcttggagacatggagtttgtctctttttgttttcttttccccagaccatttctatgttgctaagagggtaacataaagtgtattaaatcatacagtcattccttaaggctcccatagtggtggttccaaaagaatgtggcaaatgctatcaccctatggaggtatctttgctgttcagctgagggatggacagtgtccaggggtgtttcctggggaggttttgaagtgctttctgaatgacatgagaagcttggtccatgagtgtttatgctgagaaacagcctgtcccatgagcaggacccagggttctgtttaggatcagaaccacctggcccattttcctgcacaattgaaagcatttgtgctgggaggttaaggagtgttcagaagggaattaggggcgatgtgggttgccacttacactttgcttatttttcctggatgaatttaatccaatagcaaaaaagagttttgcaaaacttttacccacccacaaattttcatgaaaatgtcactgaccaaagacagttttgaattttgtatgaattgactcatttctccacaggcattttccctggcaaaatccaatgtatttgctttggcttgtatattgggcagtttgctttttaagtaacattggattatgagcacaagaaaataaatacagaactggggcaatgtccccattcctcttttatggcctgatgtatgggtcatgggccagctttggccatgcaagatattttttgaggaaaagtaaatctgttgtaaactttcccccctccgcagcctttatttttgataggatttggcatcaatgcgattatcacggattataagaccagaagagaccttaggaaaatattaactataattattatagacaagaacctttatgttggcatcaatgtgtaaattttcatagtaccaagtattgataagggtgtggagaatgggatgtgtgtatgtatgttaatttttctagaaaaagtaaattggtgtaaagttggaaagtgcatactcaggatgaaatgtgcttttccaaccaagccaggtctaggtgtttctcctgaagactcctccacatggcagcatggaaacctgcaatgacacacacattacatttgtgggttttgtttaactataaaagtataattaactcgactgtccacagacaaggtaaaccaattggctatggtttattcctatgaaatactatgaaagagttgaagatttgtgaaatacactccacatggtaactgtcacaaaataaagttgagtaacatggtatgtgcaaaatgcagtgtaatacaatttatgtacattgaagcctgcagaagaattataaggatctgtagattaaacaattatgtggttaaacaatcctatgggcagggtaaccagtaatcttagggtagtgaatatttcaggaggggaaagaaataggaagaaataggatgtggggattttgcttcttgtctttctgagatagggaactaaagtatggaaaagctctcacttctgtctggcttggtggcgatggtacaggtgttgcaggggcttcttaggaaccctttcatttcaacttgagatgttctacatctttatatttttatcccaatacagtaggaaaccgattagtatacatttcaacttccttccacataacgtttttcagatgagaacaaagctgaggaaaattgatttttccaaggttattgtttggctgctccccgttgaaggcctcctgggcagtgtctctaactttcctgacattgaactcaactggagtgcttttcagagccctggtccctggtctgcaccagagagtctggatgtgatgggtctgggtgaggttcctgtaggtggttctaatgggtgtccatcaagtttctaagttctgaccttgagctcatgccactgagttcaagcatggaggggctgtgttaggatccagtatattctcattttcattgttatctgatcatgaccagggtagactcatctttcttagaaaaaaaaccacagagataagaggggaaggaatggggtgacccagggcagtagaagtaaatgtgtgtccatctgtactataagttaaatattgacatgggacttggcctgagctgcaggcatagcattgccatcttcttggccctttgagttaacagtgacacttagaaagcaatcatatagttcccatttttaaaaggaagagagagttgattctgtccaaatacagactctcctttccttgcccccccaaaacacacacacacacacacaccaaaaaacacacaaaaaaacaaatctatcttcaaaacatttctgaagagttggtatgtttaaaaaaagacccaattttccctttttataaaatcatcctgatatgattaaataaataaaattaacattaatatcctctttgtctcttgaggctgaaataccaccagtaaaacatctggtaaagatcagagagactgcaacttccaagtcatatcccacaaggcatcagtctgtcaaatattagatgcaaactcaatgatttcaaacattgaaatcaaatttcaagactttttccagtcatttttacatgagagaggtacaagcagatttatctatgtagatgcatgttcaacatatatatatatatatatatatatatatatatatatatatatatatatcaccacaaactgcaacccctaagatgagggaacagggaaaccactgaagttaccatcagagggggaagtgaccaccatctgtatggcctctgtcaaatcatatttcacattccaaggttggaaacctgccatttggtagtggtttaattcgatttctccgcagaaagcatttaatccactgtacctggggaactaggctttcttgaactttgccctgaaaataaattcataacagattttcagcaaatgttttgaagaaaatcatggtttatgtttctttattctatgattttaggattaatgaaaaatactagataatgagagtgtctctaagaggttaatatttgaggattagtcctcattaggcaaaatcattaactacttgatggttaatgtttcttttagttcacatttgttttgtggttcatctctaattttatgcccctaaataacattttttttaaaaattagaattaagtaaatctttccacaaatgattagattaagggagtatatatcaaagcttttgggtttgtttgtgtatagttttacagatgtattttcttagctctttcagacttcaacagtgtggaaaattcatttggcaatttattaggaaggtctttagtgacctttggagtatttcttaattatcccttctttgagtggtcatgttgacatctttgagtccagatagaatttgatcctgtagaataaatgaacaaactttttttttttttttttttgaggaaaagggagtctgattctctgatctctcaaaggtatttccttcaaattctagaacaaatgacttggaaaagagtttttttttttttctaggtagttaatatttcttgcagtcattattgagcttctagaccatcataagacaatgaatgtattaaccttggatagtggatgtgtgtctggcagacttagaacctgggcaggacatgcctgatttcacatttacccaacggtgggcagccaggtggccatatcctgtgtgaatagtgtggagtctaaatagctgttattatttacacagttacttggatgagaaagttgagtaaagcctgcccatccttattgggtagcacagtgtttatattgattttcttgggccatcgacatgctcttcagtagggagaatggctaattgtttaggagaaccttaaggccattttcaagatgattgatctgagaaatgtgctgagtagattatccacagtgctccaaacaacgacgtctccatcctatttcattaggatattactgtaaatcagggcacagaaaccctgctcacatagcatgtgcactgacgtgtagactccatgagagttcttttactcatctgatcactaaatgcaaatgatgaactatattctgccctggaaacttgacaaatcttgaggaattcatggttcagagatgaccaatgaatgtatttcaaattcgaagcagtggctgtgatacaagcctgtgaaactgtttctgcaggaagcagagggtgccttctgctctgtatgcagggactggactgccttctcaagggatgtcagcatcttcaaagcagagccagtatcttgtaaagaaaggaaggaggccatttaagtagagagaacacaatgccccattacaagaaatgatccctaaaaatttgatagttctaaacactaggtaggagtggaatggggggctgtaaggaccacacccaaaggacttctactgttcaacagggaccttactcaaatttgatcagttacaaacctatttagcataaatggaaatctagttaataaaaacaaagcccttaggcactgtctttactgaggaagccacactgttgtaatgtatgtgaaatgaactattggctatccatttccatcatctcttaggcttacagatcaattttttattacagtgtacctatgggctgacaaaacattttctacaccaattgaggagctaagttgagatacccagaactcacataaaatccttggtatagtggtgtacttctcttgtctcagtactagggagacgggtccctgtggctcaccgtgagctctagattcagtgatcttgaccctgtctcaaaaatacgagagacatctgatgtgtacctctggcctccacatgcactccaacatgtgttcaagcacaccacctccgtatacacacagtgtatctgttggtgatacacagtttgttttctttgccatgtgagctgctagggagccacgtgagtgggaacaagcgaaagcttttctgttgtggacttgaaagataaacaattaaaaacctgggcaaggctagagaaggagaccaagactgtttgatcaattatgtgaaatgattaacatgtggacagaggccgtgtacattaccctgtgcatgagtagctctcctttagttaaatatttcctttaataatctgtaaagagactcaagtactgttagacaaagctgtggcctggcgcttattatgctgagcttgtcagccacttttaaacttttccctctactgctgaggttcattttagatgtttttttttttttttcccagatcacactaattaatagggaacagagctaaaagcttaaaatgtttagtggaaagcaaaaaaaaaaaaaaaaaaaaaaaaaaaaaaaaaaacttaaatcaattattctcaatatggctctcttttcccagtgagtctatctggccattggaccactgcagaccacagccctctgtagattgcagtggcccatgagaaggcgctgtccatgtgttcctggagctacatttttcctgggctgcagttttctacttggttgggttgcccaaggccagatcatcccagaggccttaggagctctttgtgtgggtcacatgattggtcctggatccttactcttaaaagttacaaggcagcttctcaagctgatcattttagaacagttgctgtgcttcagaatgtttgatggcatttcactgggtacccagacttctgagcgtgccctttgagaggaaactcagttatgctgtgttctgcttggccactccctcttcattccattcccagtcagtttctagtgtacaccttgttaggagaagcttcagggatacttcctcagtcaggaaaatagacctggggttgagtggagttgaagagaatgggaaatggaggactcagccatcaaaaaaacaaaaacaaaaacaaaaacaaaaacaaaaaaaccaaaaaacaaaactaaagtagaaatgtgttcccatttcacctttggtggctccctctgaggctccatgctgcttgaagggcccctttcccacacaccctgtttgtccttggcacacagttgaggtttgctttggggtcagtggaaagataaacccatgcatacaacagccatttactgtatgcattactgtatgcatacaacagtgtgttggccttcccagagggaactgagttttgacaaggaaggaaggacatactaagcctctcccctcaaccaaaaagtccttcagggacgtggaggggaatgaaaatgactgggctatgagcaacatgttaggagaatttagtcctcacagtgggtctcaaaaataacctgtggttctttagactcttctttaggctcttttccttctactacatacccatttactggtcacctttaggacctaccatagcttaataattaatagacacaataattaataattatatatacacacacaaagcatgtgaggcttagttggtaaatacattgagattcattagtctgttgtttctacttgtgtaaatacttgaagttttccatagtaaagtattaaaaatgagtcaaatattttgactcgaccttttggaaagaggagtttgttcctttcacctcctgggtaggctatgaaagtgaactggccagtttttgacaatctctgaaaccaccttaagagtgagatgagggctgtgcattgtgatggacgtgtctgcaatgctagtggactgtagcaggaggatggcaagtttgaagctagctcgggctaggtaagggggtggtggttgagagggatttgaaaaggcaaaaggtaagaggggagtattgtaaaatatattaagatgatcttgatgatcagatctttggctgggtgtagtaaaagtttatttctcttccaagctgcaatacagttagatttttgaagtcccagtgtccctcaggataggggcaagcaacctgagcctagtgtgagagagaagttaatgattttaagccactgcctttcaaagtggtgcatttcttcctccatatcattgggcagaactcagttacatggcccaaaacaactgggagtctctctgtggactcaagagaaaacctggaagtattgttgaatgcagcgtaaggtatcaatcagtcaatggagcccgaagtcctccctcattccctctgttctctgaatgcctttcataatttcttgaagagaaggggcatctcagtcattttactcttgatgtctgagcttcctgtgagtgttgaccacatctaatcacactcttttggtttagtctgtttttaaaggatttttttctctcattaatgctagccttgaaagttttcgaaagtttgcttttcaatttgctaagttttccccagcccaacctctaccaccctgccccaccctccattttgcttcccagagattccattggcatacaatcagtactgctggggaactctccttatctcaaatgcactactcagtttcccccaccttgtccaaattacatgttctgggtgcataattctatgtggctcatcatcttctaagccatgaggctgtgtagtgttttcctatcccacaggcactcactcttcaggggtatctggtcattattgagggcaaggtcacagatgaatcaccaagacagtcaccattgtgcaaggaaatttgggtgtgacggccacttcactaagaccctgcagcacagtgtttcccatctgttcataaagtagcatatttggtacacacagtgtggtcataaatgttcttctgttctctgaatgcttgcttttggtcatgaactggcacacactcaaggaaagaatgacaaggtacctctttggacacttttggtccatttccataaatatattcaaacaaaacgaaattgcctgactctttataatatgtcctttagtgtgtttaaacttgcaaaattatccctacggatgacaaattgtaaacaccatgcaaaaccacagccctggttcaaggcctatctcagggttcagctgacattcacccttctcagaaacgtttaaagtgttttaggaaaatgcagctaggcaaacaagcttatcggcagcgacaataaaaaaaaaatcattgattctaattaagaggcgtcatgtatgcagaaacaacgcgcttttgtgtggtagaaagccttcctgctctcttgatgcatggagtgctttccagtggctttagataaccgtgctgacaaagtttcaggccctgaccttttggcccatctcaagtgattcagccgtacttgttgaaacttgtctaagggtttggtaggaggtgtgctggattcagtccttgtaaaagtgcaacagcaaggcaagccctatttctgaaagccagtagctgcatctgaaatggaggtggccagcatttgtgttctggggcaaagtccgagtttatttcctccctctagcaagcatttcccacagcagccttgtatactgactgacccgctgctggtgagaactgcagcttctctggctgtctgggtcagcctgatcctgttctattgtatgttcctggaaggttgcatttagatggtgaccctgattttgtgctgtgtccacagaatggggtctttatgatggaaccagtcaaggaaggcactgtacaatctgagcaaataatggagaaatcactctaattgcttactctattgaggtggtaaatcaaaatcaacaactgtgccacccccactttccttgaattcagaagttaagaaaaaacggatttctagaccatgggggtcaagaacacagatcttggtgaatcaatgggcaatttagttctgaattaagagtacatagtgaccatttgtagtgtcaatgatttattttcaaggagttccatcaaaggcattgctagttgcctgattgtatatttcctccaaagattgccttgctaattaccatcagtgagtaatagggattgccaaaaaaaaaaaaaaaaaaaaaaaagcccattgtgtcccaaaggaatgatgccgccaagtgtcttgatgggcttgatcggctcctgctgtattcgtcaaacagctgtgcctgcaagtgaaattttgaatttggattctcgcttagcagagattagaataggcttaattgaaggtgtctgtcatggggcacagtttcaaactcttaaatccagaattcatgcatttcttaaacaacaaaacattctactgaccaccactaaactgctttgttttgtttcctcctccacttgtcagaaaacgagtatgatatacaattcaaaagcagaaaagaaacaaaaaagaaaactgctgtaatgtagaaatatcagagattacttgcatatttgcttcacttaaaatattttagatatttaaatatcttgtttatgtaatgcagagttgttcatctcattataggtatgtatgctctctgtggtcttaaaaaatgattcttagatgcaaaagggaataaagggtctttgctgattgcctccactctactcgtgtgactgctgtaccgagcaagcaattctttccagtcccttccttggcaggtagtgggggtagtagaacctgcaggatatatccccgccagactctctgtcttccatgaacttacactctgaaggacgaagggagtaaacaacttagatatccaaaagaacaaaatcccagttgtgtgtgtgtggggggggtgagggggtttggcttgtgtgtagtagatgcatggaaagaatgccttgaatgaagtgaacaaaggacggagaagatggtgtaaggggaactttgaggactgaatcgtttaggaccttgcagccccttgtaaggttggctttgaataggatctgatttgtgctgaaatctttgagtgctgtgtcaagagtagatagagatatgagaataaagatggggagaataaacttccaggagtggggtcattgcactagccttctgtctgctcatcttatgtctaacagtagaaattgaacctatggctagatatgacagaactttccaagggttgggcatagtctatgtaagctggagacaatcagacgtgaccccacaccccagctttagcttctgtgtccctttagctgaaatggggggagttgtggtagacttgtgaaggttgcagagttggatttggggctctctaagaagtctgttagccactcagatgggaagtctgtacattatattataggaagtcttgactgatacgaggtgggactcacctgtgtgtagatagcatttagaagactggatggactgcttcatggaattaaggagcagagtgacagcaacatttgtctctattctggtttctgtagcagcctgtgaaaggggagatgagtgataggaggagggaattcctcttcaccacataccttgcatttactttgcccagtactgttgtgttccctaaccccaccttgttcccgaatgcatctaggaggattttgaggggtcaatgaaggggaaagatactggaatgaagaggcttttctaagttagcctcccatggaaatatctgcttttgtgcttctagactgggagccaaacaaagcaaggggtgcacattcgctaagagaagcggttcatcatggtcggaagctcttggaattggagggcatatagcttagttcctttagtgtaggctgtgtaatcctactgaggaacagtagtagtatttcatgttgtcatcaggatggcaggggatccggaacagtgtatgttgagggcatttagaacagtaggttgttttatgtcttcccaagagtcaaatcccagggtgatgcatttaaataaattcatctctgtgtttttatgctaccttgttctagaatgggtgttttcagttgccttactgatttgtccttagagagggcgtagagggcccatgtggagtggccattcgtaggactgtctgacagactgatgtcagggtcagggtctaaatattaaggaagggtttttatgttgcttttcaaagtgagtccttggacctgaggaaattatattaattttaagatcacctaattttgtttattctccctatggacacagcttaataaaaaccctttcgtgtgctatgtgttggatttgttttttgtagaatgtgacgcagagagagcaagaccttacatttgagcttttcaagagtttatgatgtgcttgtgtatggcaataaatgtagctggctccaactggatacttcttttgcttgactgttatgtcatgtctgcatccaaagaggagctaaggctcttgtttttctcttttatatttattttccccttgtgttgtctcccatctccctctaccttctcagcaccaattcattcccttgccttttctctccacatacagatcttgagaggctagcttggagaattgaggttgcagaagtgtttaagagcactgttttccataggggactgtgaaggaaagggtattcattgctttagaatggtgacatgcaggcagactttaatagactagggagtttaggtctttgtgggtactgacttttaatattttttgttaaggttctctaccctactaggtgggtccgggcatcataagtttaggacaactgatgttttgagtgtttagactggttaatttttgttggtgatggaatctcttgggcattgggcactgtttagctgcatcccttgtgtctgttcactgggaaaccctttgccacagaagtcacgttaaaacctttatgctggtgggaggtgttgcctctagttgaaagcaccgtgtcaggggagattgaatccgagaaacttactcttgtagagatagttacagacttcgagatctcagccagtgcctgaaacataaaatatgtggtttaaaaaaaacaagctgccatggctgagacatgatatcccctctcacttcctcagcctcattaaagaccttggccatgaccactacaacatctgaggactagcctacaagaaataatcgtttatccttccaggattgtggcaagaacacattgtaaactatgttaagtaattttttgacagagcagtttcctttttgtagaagtaggaagtacagatgtcaatggaggcttggttccctgtcctagaacaatgaccatgtctagaattatctatcatccttccttccctccctccctcctctcctccctccctccctcctccctcctccctccctcctgctgggggattgaactcatgactgtgtgtgtaccagggatgtactttaccactgaagcacatcctcagtcctagaatttgtttctagggggtgcttacagggcatacatagtacaatatttgaaagccagcgttatatccctagacgacaacagttcttaccagcttttgaatatgcatggggaaatcgtatttaccttaaatgtacagaacttaggggtgtccaatttttataagtttactgtatgtatctgtgaccgccctgcctcttggttctgggtgtgaaggtgacagttcaagcttccttcctgagtggcttatggggaggctccacttttgtgcccatgaccctggataatggtttgttagttgtaaagggttcttgttccagtatgatccagctttactgagaaaagctaaacagagcttgcaatctaccactgtgtcaaggctaacactgcttgcaaaattaaaccttttttttaagtatcagccctgtgtaaacaatttaaaaacaatcagcgttctggatcataatcagaaaaatagtaggcataattactagtagttacatttattaaacttgtagcaataattcctaacttaagtgattcttcagctagcttgtgccacacagtagattccaggtaagactgcttctgagactgagcttctaacagttagagctggatccactgacatgtgagagcaactttacacggcttatactgagcaatgaaaatcccactctgctcgtgacggaagagaattacttgacagtggctttactggggcctttgctttggaccggagagtaagtaaaaggtgttcatggtctgagacagactttggggaagctttgatctgcccaagattgtaacaccctccatttatttgttcacagcccagtgacagacacacaatcaccactttctcacaagagtcctctgagtgacagaaggtggtaggagtgtctattttcattttagaatgcaggagcagctcatgggacattttttcccctcaaggttaactacctagaaagtattggactatgaaccaggaccaagggttgtaattttcaaccagtatcttttccagtcagcctcctataaagtaactgtgaggcatatttacctcattctaaacactgctgattttcagcatccccattctctttgcccccccatacaccccaccagacacacactcagacctactgttgtgcatgaatctgagggaagcatttattttgcgttcccattggtggtatgaaccagacaggcacagttcccaggcatcatagagctccgttttgggaggagtttctttcccagtgttgagtgaaaatggctctctgtgccggaaactcacaagacctggccccacctcaaaagctatttaactttttattgctacagaagaaagggttcctctgactttacagtgttggttaaagggagacctcagcattggacagagaatcatttcatcttgtttacaacagtgaggcaatgggagtatgtccccttttgagttgggttaccctagaaaagtttatttgtatccaagagaaactttatacatcgctgaattgtattacaaaggagtattagaagctagtaaaatgttctctaatcaggtggtttttaaaaatacttttgttgtagttatatgtttccattaaaaaaaaaaaaaaaaccaagacaggattctttgctgtactctcccatgtttcagaaagtatctatcttcttccacaggggttttgtggccctacaatttatgtgagaaggtgaggttagtgattaggacagtgtatagggtgtagcatttcagccctgttccccatccatacatggctgtttaaaactgaacaggaatgacctgctagtatgagctgagccccatctgttctggcccctgtctcaggaaccttgtcagtcacttacttgtacaagaaggaaagttaaacaaaaggataccaggactttccactttgtttgactttattccttctaaacagtcttctgacatatgtaattttatttttacagaatccaatatggaaggcagagtgagcagtctggttgtttctgaattacacactgggaaactgaggctcagcaaagttatatgaggaaattgcttaagctatgaaattgagggtctttaatatcatactataaatgttaccattttcactcaaaatattaggaatttaaaggtgtaagtgaaatttatgcagtttaaattctctgtgaagtcatataatatataaatataatgctgacctcattttacatatatttttatatattaacagggaatattttatgtcctacaaaatagaaaccaaaaccaattaagtttgtaaaagacttagaaagtcaaactccattttttcagtgggatttttgttgtaagtggagttgtgtatcccccaaaagataccttgaaatcctcattcccagtacctcaaagtgtcacattttggaacagggttttcacagatagagtcaaatcaaaatgagttcagtaaggtagcccttaatccagtgcaacagatatgttttaaacatagcagccgtgggatacagagatgatagatagatgtgccctgggacgatgactcgggggggggggatggagatagtcacatgactgagtgggggtgaaggctgagaagtgtttgccaattgaagatggttatagaagcattgattgatcatggtgcttcacattgaataacagcagcacagaaacacaccattgggagcaagagcacagaataacccccccacacacacacatacacaaacacacagctctcacatccacacctttaatctgtactctgcagaaccacaacatggggaaagtttctttttttttaatttaactttattttatgtacattggtgtaaggatgcaagatcccctggtactggagttacagacaggtgtgagctgccatgtgggtgctgggaatagaacccgggtcctctggaagagcagccactgctcttaaccactaagccattctccagccccatggggaaagtttcttatttcaagcttttccagtgtatgacactttgcacagcatcagtaggaaactagcgcggtggtttccccctttccccagggaatacgttccatgaccacctagtgcagttctcagcctgtgggtcgagacacctttgggggttgaaagaccctttcacagggttgcattcaggtatcctgaatatcagatatttatattatgattcataatagcgaaattatagttatgaagtagcaacaaaataattttatgggtgggggtcatcacaacaagaggaactgaagtaaagggtcacagcattggaaagttggggaccactgccctagtggatgtctgaatcgtgtggacagtgtcaaatcctgtatgtcctatgctttccccatatacacacctaggataaattcattttatgcattaagtaagtaagggattatgaagataaaataaaacaggacaattaaaaaattatatgaatgttctctctttatttctcaaaatacttaattgtactatgttcaactttcttgttgttgtaaattttttggtttttcaggacagggtttctctgtattgttttggaggctgttctggaactcgctctgttgaccaggctgacctggaactcacagagatccacctgcctctgccttctgagtgctgggattaaaggtgtgcaccaccaacgcctggcctatgttcagctttcttactgtgatagtgatatgatgacccagtgtttacctggtgaaaaagtgaggtgaatgacattggcattgtaacatcatggtaggctgttgctaatcctacagtgtgtcagaaggaaccctgctgagccatgatgaccttagttgactgggattactgaaactgtgggacaggaaactatggcctggggagactgctggcccaactgcttcatccctgtctcctggcctcttcggagcctatttaggtgtagtttctgcttttgctttcatcctgtgattacagaagccatgttgcaggcttgtgaacttagtcccaaaggtaacagaagccactgagctattctcagaggagtaggaagtgaccaagcctgtttaaaatggttggttgtcatgtagaaaatgggtctggtgaacaggatgaaagcaaaacaccagggttcaacaataaatctctatattggtcaagcccagtgatagcatcacataggacttgaccacaggaatctgtatctgtccctttgtgcccagacatcagttagcatggtcttatctgtgcatactttcttagactgtgagtgagagtggggtaaacaagatgtcttctggggacaagtactgatgtgctaaacaccagggtttcaaatgggtttaaagtctgttcgcaggaaaactaactcttgccaatttgtggattagcccattctgacctgggcatgcatggccctgttttacatgggagtttcttcaatgcctttggcactatatgagtgctaatctgggggacatgagtgggtgagcttctagagaaatgaattcatgaggctgtctgcatttaagtcatgatccctagaattttgtgtcccaaatttgattatagccataaaaagaaaaaaaaaaaaaagatgaaggtggatgctacagcaagggttgggacaggatatttaaataaatttggagaacagattgagtttagagctgccgggaaagttctactgctgagttgtacaacttacagttggaaggaaggaaaacgctatagaggccttggtccacatctaattactctcccaggggaagttgtttactgggttcggctgccagcctgtgggttgctttcctcagaggggagggctagttgatgtagtgaattgtaacatttctgtttcactgcctattgatcttgctcgtggaaaacattagcactatctcttgtctgtctctcatcttgcattcccccattcgttattcccagtgctccctccctgcccctgttagtaattcttggcacaaagggacaggtcattaggaatgtcctaaggtcgagaatggcaggactccatgttactgcagaattttaaaggcagccattacacagacttgaataaaggggttagcatctgagttagagcatgttactgtgttctgagtgtggtgtcttcctcagtgtcagtggcaaacaaagggctgatggaatgaactttatttttgttttcacatctgacctgcggaagctgctctgtaatcgttgagagtgccattgtatggaagaatctgtggctccttcgagtgtggtcctgagacccaggttttcaaaacttaggaactattttgatatatacaggctggtaagggtgatacaacaaacattcaagccagcacaacaggaggcagcctagaaatgacgtggagataatagagaagcttcaaagtgctctctctctctctctctctctctctctctctctctctctctctctcacacacacacacacacacacacacacacaggagtagtaaccctgattgctatcattaagtggatgctgtaaccgggctcagttgggttcttgagagacagcatcctgataaaatgctcatgttgaccacaaatcactacaggagaagatcatattgatggcattgatcatgttgcctcccattcaccaatagcaacagcacagcacatattcatggcacatgctttggtcagaaagttctggaataaatggagaagctaatggaggtgtctagaaaatatgccttatcttctctttgcctttttacagagtttgaacaggtgaccccagtagagaaccgggacagaacatcaggttagcccactcctcttactcccattcaggcccaggatttcctggagaccaatgtttctcctaatccttcttccagggtagcatgaatgtctttattcaagcaggtccactcacctattaactgtcagtcctggaagacccttgtgtttcgtctcctaactaagggaagaggcatctttccattcagagggatgcccttcctcttgacgacttgaagaggcaaatcattgtagcctggagggtttgtggtgatggttctctgttaagaagccttccagtgggtggggaatgtctaactcactcccctgtttggctttctaggttagctcataagctctcttgcctccccctccatccccactggttatgtttggaagactagatcatacatagcacatataactttcctaaactcagggagggaagagccccctctataaataactgcagagaaaaggtgatttttttttttttagcttacccttcatccactaactttaaatgaagccatttcctgaaccaagccccactgttaaaaaatggttactgaattaaagaaagggccattgagaacttgagtcctggaattattcataggatgaatgtgttaacttttgttggtgggacaagttaacaatacaaatggccttttagttgaaactattttgggactaggtgtgggagtgattctggctatgtctctaacagccagtaggggagaagaaaccaaacacgtatatttacctccatctaaatagagtcaattagcacaaatcatctggttattttagttttatgtaaaaacacagctttgaagttacttttgatgattcagagaaagaattaagaaatgatctatctaatcctctaattaggaaacttacctttgtttttctttggcatttccctgctttgcattcagattcatgttatgacaaaagccataagaagatcgagaattatgttccagcctgagttgctgggtatgaagtaaaggacccagatttggagttagttaggtttgatgtctttgacaccaggaaagctgcctaactcctgagggttggcttcctaagctgtagaaaggagttgatatacctgacctgtggagttggtggtggggttaggggaactaatgaagtgctcggctgccacacaatgagtgggagctcactggagtattagcacttctctccttttgtgtgggcaggttgaggttcagctcaggttagccggagcatggatggatagttagtgtaaagcagatttatagctgacgctcctttgtcatcgtggatgagggaaatcataggagtgaatggatgtattcaagagggcagggttgtgggtagagaaagattaggttccattaagtctctttctcaagtcccagcctttctctttacactatagtgtgacccatgatccagtaatcctcactcttaaatcccataaaacctatcagccacttttgaaatctctcaactgactccacgcctctaaaggatctatatatgtgggtatttccaactacattttcattaagacagacatgtcactttcaggtcctgtttacattataagacctttttgctcatatcttcctgaagtttgtgactgctcagaatttgggtgtctctgtggtgtagagtaagatggcactcagtgacaaagttgaccttcagaagtaaaatgtcatgctcaaagcacatgtctatttaaaacaggataaatgttgatccattccacctctgtggggagccacctgagtgtatgttcacctagaataccagttgctcccacatcacaacagcaaggtactgaacacacaattctgtgtgtgcttgctaatgcagtaggtgagagatgcttgccttttcaaggattggatgacctgtcttgttatcctcttgtattagtttcctatcactgtgacgaaatgccagagaagattgtaagaagggaagacttagttccccatcagaggtttcaacccatggccagttgactctgttgccatttgggccaggctgccctcattatgaatggaaagtgaaacaaagaccaacatgccaatattcctttcaaggacaccgctccagtggtcagacttccttgaactaggccctaccttctcccttccaccttttccctccagcctcacagactgacagcaaaccttctgcataggggcctttgagagatatttaatacccaaaccataatacctttcttattctctgctcatctttcttcttgcacattcttctccattttcctgtctatcatctagtgttgtagattgagattttagtttgtttaaagttgtttattgaagtgcttatatctaatcaagaggccagacattggcaaaaatgatacatgaaaaaaagcaatatcacgcagaataattggtcagtagcttatggggaatggagctgtataatgtaaaacaacaacaacagcaacaacaaaaaccaagaacaacaacaaaaaaaccaagaatgttcaaatattgataacactttctattcagcttgaccttgatttgactaaggaatgcatctttgaccttaatggactgaattcatgtggaaagtgtttcacattcctgggaacactcctaactcctttatggacaatgcttttggtatgccagtcaacctcaatgctgcatcaacggtgggagctacaggagcctgggttttcagcttagatgatcttgcaaacttgtccagtgggaggatgtgtatgaaatgttgactaggcaggcaatggcctctctcagaccagataaggcctttacaagtcacccagggtattggttgagtccaaagtcacttagttacctagattccttgaatctgacaagagtaaatgctcgtcctgccttgtcctttcaatagttcagatcctctgggactggagttaaaggaaggcaaatgtgagtgcagggaattaaacttaggctctttgcatcagtgctgtgagttcttacttgcttagctatcactctagcctgataatattcttttattttaggttttaagaattagatgtaatatccttactattattgttcacacaagcatacatattaatttcactttttatattgccatagatactcaccctctttttatatatgagcacaaaatcacagagacattgaataagttattagaaaatcttctcaagtcagcagttgcttgagatgtgcttttagctggactctagagctgtaggtgtggtagttatggtgaatgaggcactttcccccagcttatacccagtgctggacccactgaccataccagaaatagtgtccccagccatggcagttacggtcatcacactcctcggccagaaaaagaggatgtgctctgctggtcctgagctcctgttccgattcggcctggggagatatactgttttattttcttcttaactttaattgctaccactgctgcccatacagagtgtgctgtgatctacccagctcccaggaccaggtccatgctttactgtgtgtgactcagattggcattctcaacaaaaatggtttcaaagcttaaaacaacaacaacaataacaataacaacaaaactagaatcaaacagtgataaagccaagaacacactgggttgagtctgttggggggcctccaaaggcagatgcttgctggaggatgacggggacaatagggaccttgaaaggaataggacagtgcaggccagccatgtctaagctctgtctagaaaacaggtttggggatttcagatagatttctgggagaatcacttagctttaggtaaggcatggggtagaaaattcctcaagtctctacaagcccagaaagctcatctctcactgaggtgaaacagaaggggccagccaagctgcagaattcttggataccagactccttatgccaagagtaggggacaaagtgggacagtctgttttgtcctttctgacaatctgtagctggagatttccctttctcactgacatactactgaaggcacctgagactaagatttttaatgattttggtatttttatatgttagagatattcttccccaataattttgaaattattctataattttctttccataatattaagatattttcatgtcatagctcctgtatataaatacacacatagttccttattaacttttacacactcactattcaaatacacacacttttctttctgaagtttttgtggaaggggaaaaatactacttgctcttcaagattatactttcctggcatttatttccttttgaaggtacttctgcagtcaaaccaggtatttcataggccactactaacatccttctctgtccttgttgtcccagagccatgtatatttgtagaacttgagttttagggacctcaccgcagttgtgatgggtgactaagagccatgaaatggtagcctaggtcaaaagaactcagggctatttcataagacaaatgcaaagctatcgcagcctttgaagtgcatggttaaagcatttccaatagctttaacacagacagcagatttagatgtctctgtcaacactgagtccttggtaaccccatctcaagagccttctcttccatttcttcctgtggggtgaggacaggcctttggagctttcagactggcaggctgccatgtgggatttggctgggaagtatctgaaaagaagtgttagtatattcactttggccctagtttgagaactgtatagctggggctcaataaacaattgtgacagcattggatagcttgttttaagacgtaagatcattgtcctgtgaagttctccttgcaatctgcagttccctcttaaatttagcttgagggacaggcttagtacagtcaggtaccttaggacctgtatgggcaaggaaaatgaaaagggggtgtgcttctcatcacagcgatactaagcaggtgagaacattccttcttactctcataagaacttgattcactaaataaatggtcagctgtaagtttaagtgtgttttatttgtaggctggcactaggcttacaaggagacgatcaagtcagtagggtggttatcaacaccctgctggggaagattgtgtgccggaagatacttcttcttctcaaccatcttcatttcccctttgctgtttgtcccaaatggaagtgggtgtttggcagttttaggaactgatccagatccctgtgtctgtgacccaacactgaacattattaaaccagtcagctgtggacttgttagggaattcgaggtgaggtggatctgaagcaatctggtggtcactgagcgccatcctgtactcaaatgtctatgctgagaaatggacaacattgagatgatacagatatgaacgaatctcaagcatggtccgaaggccagcagttctatatgtgttgagctgggatggaaggagagaggtgggaactttgaggaggaagtggcagacttggaacatgagtaagaaggtggctgcccccttaggacttgtcagctcgcctaggagtgtggatcttgagtgtcctatctcagatgctgaatagacacctatttcacccacaatttcatcctacaatgatgaacatttttttttgtatttttgttcttagtctcttatctccccccaaccattttcccttccatccttctttgcctgtttttccccttctcccctttcttcccccacccagtgtcttttcatatctagtcaatttttcttactttctgagtctcattctgtagcccaggctgccctgaaacacaagagcaacccaggctatccttgaactcaacagcggtcctgttgcctcagccttctgagggctgtgatccacatacttggctttaccactttaatggctttgtttatacaaatagggttgaaactctatcctgtcctgtttgctgttctctgaagcaaggtctttcaaaccacttcctggtactcagagctgtagagtttccactggaggaactagactataaatctgcctggaaattgttgattgttttcccattttgattctgaggctagcaattctgaatccagaatccattttcctttttgtctttcatcttggaacaatttcatcatgcagtagaggccctgcatgctttttggctgtgcatatattcaaggctttcactcgaaattaggttttgctaatataagtgggaaagaaaaaatataatcatctagatcttaagtgagggagaaaaatacagcctcttcattaagtacatccagagtaaacctatttatcccttttgcctattttatgtttctttcaaaacctgggcttattggtttcaaggaaaccaataattgttggttttcctcattttaaaccttgccatttcttaggattcaccaagtttggttaagtgatacaggttgattgtcagcttgtagaggccatggagatgagaggcacactctggtgtagggatgtgtgatccagtgtgagcatgccctcatatcatcacatagttggttagtctgcaaagaacagcaaggttctgtggccattgagagcaaaaggagattgctttgcacaaggaccatgcgaagtccgtgatccctcatggccaggcaacactgtccagtcacctccctttcttacccaacagaacacatgtgggaaaagaaattcataacccacaaaaagatacatggtggaaatgggacagttgttgaacacctcccatcattcttctctagagtcaccctctttacaaaagcttacttcatctgcttgactgttgttaaggatttgattctagaagattggtttgcagttcaatggaatcgatgtttggcatttgtgctctgttggtttctggtgattcataccaagaatggaatcctgacccctgagaactcccagtgtaatatgaaacttggattattacatgttcagtgaggcagtgggaatatgggggagtttgctctggtgccagagagggggagggagggcttgctgcactggagtgcagttaagaggtatgacacgggggcatgaagcttgggcagtgaagcagtaacaagactaaggatggagacaaggtaaatcctgggctcagagaactctgtactcaaagaaatggaaagttgaaaatcacgtgtttgaataggatccattcagtgataggtaatgtctagagagagtggtcagatggtcagggacactaaatttatgatcttgtagtttgggtaccatacaatagaggatagagggaaatggatgaagtaatatacacagagtagggatacatggcttttagagggagagctgttacagtcctgtgaaggctggaatagagaaactgtcatcagttaggacagcagctgggcagggtacagtgacaagttggtggttgaaggcaaccagggaagtctgagagaccatatgaaggcaaaggacaggctctgaatgtgtagacacactctactgtaggtcttgctgagcagatatgactgagtttagacaaatgctttgctactgaagggagcagcaatccatagaagcaaagtattcccagactgaagactaggaaatggtgagaacactacagaagagtaagcagttaaactgtatagattacaaagccatcagtaaagaccaagtgattgcagagtaccagagtgacaatagtcaagagaagggggagggagggagggagggagagaggaagggcgggagggagggagactgaacgaggggaggaggggagtgcctctgtgtctgaccactgctgtaccaccatgatgttagttcccttgaagtcaggcttgagaaggagctttagccagctagaaagtcagtgttgacgtctaagaggaaaaagagactttggcaagaaaataaaggtcagagtggagagtcccatggatagctgtgatactctgacgcactgtgaagggaggatcaagacaagaaagaaagttggcatcatctccctgggtgttacctatttggccaatggttggtcagtgtgatacgcagtaggctccactaggggaaagggaggcgattgtctgaagcaggaaaggtagaaatcaaggtagggagaggggaaaggtcaggggagccaccactagggatattctgccactgaacttggattggtccatctgttgccttcaccagcaagccgtaatgtccattcatttctgttgaatatttaacttcatgcataagcccacaccagaccattttctttggattcccccagaaatgtgttccataaaggtttgcatctcttcgcttatagaatgtggtgcttcttgtcacagatgggcccagccctgcctgcatcttcctgtgttacatcaatatgaacacagaaggcttctttggaggacgtggtgccaaatatcatagacagttcctatgagcggattgagatgtacagattaacagccacagtcctaacatggtgttctagaaacggcgtcatttctgcaggaggaaggagccagggagcttgttaggtcaccagagcctggagcctgccgtgcagctttactgtacggcttctgttgtttataacgttctgtaatgtgtgataacaaagagcagtgtgtggtaacaaagaacactctgttaccacgagttattttaaccaccacccttcactgctcagcctttttcccccttcttcctcacagctctgtttctggctccatgtctctgtcacccacttccacctcctccccagctgctcctcctcggctccttgtgtgaagtcctttcccatggctctttcctttaccaccgagaacctgctggagaatcctgcgtcagagcacttgtggtttgctcttaccatttcacctccccaactagaatttctaacgcgcggggtctttaagttagagagaggcaccctgggagctcttgaaagttgagggaagcaaagagggagagggagagacagagacacagacagaaagggggagagagaggggaggggagaggggaggggaggggaagggaggggagggagcattggttgctggtattgagacctttgtagttgtttctttcttctcaaaggactcctgattgttttgtgggtgtttattcttgtgagtcttagggctccccctacacaaggcaaggactttactactgggctatgtccccagcctttctcactgtctttcttaatataactgcctaagaagcactcaagttttattaaactagacctggaggaatcattgtattttgtacacagtcacttgaccccaaacaccgattgttacctgggtctaaattgattctgtgtgagtccctggagagagctgggcagtcatctgccatggaaacatacctaggatggtcaaatacaggtgatttcactctctagcaatgttttcagtatgtgctagggtctattgttacctcatgaagtagcaagtgaagtcaaaggtttgaaagaaactatggttacaggtagtgagttttgtggctctttcatttcttttgggggattagttagggtttgtagaacacacatgagctgcttctctgaattccttttctcgtaacccttgcatgtatcttcagtgttgtaaatcataccaagaaaaactaatgtagcattcaaagaaaccctaaagtttgactacgtggcctttaaaaaaatctattgttgttgttatttctccatttctttactttgactggaaatagggtttgtagtattattttaagcccacgtgtccagtagcagctgaaggtgtgtgacaggattatagctgttaggctcaggaacaagagtagaatgtcacttactgatgcctgctttgagtgcagcaaggactagtaatggcacattctaggtttttgccattgcttctctaatgtcactgagaattattaacatacttgtgttttacacacacacacacacacacacacacacacacacacacacacacacacggggagggggagggggactaaatcaacagcacatggttctattctcttccaaatggttcactttcaattaaacaaatttttatttttttcctgattcctatgtttttttggtttttctagacagggtttctttgtgtagctttggaacctaccctggcactcaccctgtagctcaagctggcctcgaacctacagagatttgcctgcctctgcctctgcctctgcctctgcctctgcctctgcctctgcctctgcctctgcctctgcctttgctaggattaaaaacatgtgccaccaatgcctggctctgattcctgtgttttgaaaccaagggcaatagaggaaaaagtgtgcagatatcacagttgatatacagtatcactttagacctagttgttttacggaaagctctggcatctgcagaggatggggtacaaattgtagcccataactggtctatacagcactagtcctaaaattggacttttttttaatgaccatgggcttaggagcaaaatgaggtgttgtgaaacaagtaggaaatcatgcatattccatcttaagtctgttttgaaagtgaatactaatattgttttaattgctctcggatgtctgacaaaattatgctttggaaatacccaagtaaagagtctggagctgcaaaaatagtctttttggaatgctggacagggatgggtgatgctaatcagatttcaaggttcatcttgacccactgcctctcgggacactgatcaaagttcgtgagtccttctgatgcggagttattcattagagttctcagcacataattatggattgtcagaagatctcagttttgtataatgaatgagtagcatgcctgcggcttgctgaagtgttagcttaataacctcataagataggttcttttccttttccctcaagaccggagcaaactggcttgtgtcttgcccaccccacctcaaatcaagatgtaacatttaggattttgatttctctaaacgtttagttctaaggggaagaagcacagctttgcatttcattgcctttccctttgttcttccgtctttggaactggaagtgtaacagattttgtttttatgcccaaatcttggtagggacctataagtttttctcccaccacacatggttacatacagtaagatattagtaaattggtactgataagcagtaccatgttgcaaccgatgtctgcatgatactcttactcagggatgcaattatttcccttggttttgacaagatgtcaactgtgatgtgcacagagcataaacatatcctcagacaccagcatgcattagaaatgcttccagagggaaactcaagtatgcatctggagctcccactctgaggcgtcctctgccttggattcttgttgatgtttagattattagctgattacgcacatgaagaagcactgaagaaacatgactcattctatttactgatcataattaacaatggtttctagggatattgtgccttcattccaagttgagggtttgagagaagagctgttcattatcagttattttgttggtatctgtggcagagacactcatacataagagctccaagtgggaaaccatagtgtgggatttaggaaagccctgtattgcacagctactgcatggagcttgctgttgatcaggtgatccactggacacagcagagctgatggcctagttggtgaagtgtctttgtcacagtaggttagtggctataacagagccaaccttctgctccttggctacaatgacaacacagtcagaatgtaattctagctcagttctagggttttctacagctaaatccttcttttccccaggtcattggccagaactcaggcacacagcccaaggtagatgcaaaggcacatggaaaatgcagtctgatttactgcccttctggctgaccctgctccacccctgcccaaccctgctcctagttgtccattcaacagctcatcgaggattgaatggggggaaactctggatgcctgggggagaggagatagatgtttaatattttttgaagagaatttaagagcatcatcttttgtaccagctctgtctggcagaggtgtcctgtgtcacactgaaattctcactgataagttgtgtctttagtgatgtccagcattaaataaacatgatccttattgtttaacccaagaagagctaagcagttcatggtcaccaagattggggcggggggggggcggggggggggggggggcggggaggtgactgttacttacttccatggtgagtggtcagtcaggcagtgtagaaaatctgtgcatcagacaactgactgctctgtggagggtgtaggagccattttgtataatgttttccttaggggtgaatgggaggtggagcttgtattaatggatcattaaaaataacaaaataacaacaacaacttcagaggtctgtttgctgctggaaaagctgatgctatttgctccttcctgctttctcagtcttgatatctgttgcatatctttaatgtctttagacttcttccgtttggcaactctgacagacttcagccacctactattcagggccagcagtaggagctaaaagtttattcatcaagggtaaatagtattttaatgtaacattttaaagtcatcagtatggactgaaaaacaaagtatcaaaatttcaagtagagcaggcagagcactagtgattagccctgcacctccatctgctctgtgtggcacagcatagcagtgccaatgaccttgtattcatttaaagtgatactttgttcattgtgtatttttgggccacttccattattatatacacatctgattactggattttgactccccaatgaagacccaatatctctcctatcacctgagctctggtttccatctaggcctcagtgctcagtacagggcctgcaacagaactggtgctcagggaatgctcatgagtgcaaaactctgcaacaaagaagagggatacgatgacagatgaggcatccagcacatggatggtggtttttaaatgaactaagaaggctctactccattcagaaggcgagttctacaagggcccagtctaggcagactcattgggtttttcaaggaggcagagtcctgtggacagttctttgacattgtccaaatggatactctgttaaatttcctaagtcctgcatgaatctcctccctgtctctctctgtctctatctctctctatctatctatatctatctatttatctatctatctattcagtatccacctttcttcttttttagttttgtgtctttcttttagcttacatttgcttatcatcagccatgtttcattgaatttctctggtgtgaaaggtgcttgttgtggtcacaagtattttgaagatggtttatttctgaaatcttttcttcaaaagtagaaaatgagattcttcctgctttcaaatttattctatttttatttatgtgtgtatatgtgtgtatctttataagtgtatgccgcatgtgtgcaggcgcccaaggagaccacaagagggcatttggtcgctggaactggagtgagaagcagttatgaactccctgatgtggatgctgggaacagaactctggaagagcagcaagtgtgcatttctccagccctgaagctaagattttagtctgtattcctgattgtacagcttgggctattacaaagaatgtgcttgaggataaatgtctttgtctgcagcgactttaacagggtctcaaaggcagaggaacagaacggaaggagtttgaaattgccctgatccccacctaggtgaggcacttgctaaatagcctggtgagaaaacctcaaacatacagtaattttgtggctgtgcagatgttctctcgtgtgcagttccgttttgctgtttttgctatttgtagatgctgtaggagtttaaggctgtatctctcccataagacacatcttagacagtttttttcccctaatttggctttgatcagggttattaagcaagtcaaattcttcttttcctctctgaagagagtaactctaatcacttccactcaccacctttgttggcagttgttgaggtgatacaaagagggaaagtatttatttgtaatttacatcatatgcataaatttagtgtacgggatttgctccaaaaacaacatgaccccatctcagaggaccagagaaggagacaagctagaaccaagccacagtggaacagcagtgctggcgaacctcatttcagtgtatgaaatgtcagtttcacaaaactgttttgcattggactgtttgattctcaccgaaggtgggctctggtgaacttatttcttgaagaaatgcagttgtgtttttcataaaatgacctgaacgaatagttctgaatatttatctttttagttatgtgtatgtgtgtacgtctgtgtgaatgcatgctgtgtgtgtataggtgtcctcaagggcccaaagggggctcagatctcctagagctgaaggtataggtgcttaaaagctgcctgacatgggtgttgggaactggacttcctttggaagagaagaaagtgctattgactgctgagcgcactttccaactctaagggttttgtttttaatagctttatagtttttctaggaaaaagggtgagttggactcatttcagagtacaattccttccacccagtccctgtcctgtccctgtcccctctcctgaattctaaagaagctaagcccattcttagcagcttctatgtaactaagtatagcctagagtcaaaatttctttgccaaactttaagctacagcagtctgttatagccgagatagaaacctttgaaagaagaggcatggctggtgggaatgactgtgccaaagtgataatggtatctctacttctgtctggcctcttgtggtggccagatcggctgggacacctactttctggtggcaggtgccttctgttttgcctgaggtgatttagatgatacctgaatctctatgccagaagatttttgaatctacagatttgtatgggaccttgaattgtccagatctgtgcttgcctgtcccttggtgtccatagaaggaaagagcaggatattgttgaaggagctgggataggactaaacaggtctgtccacgatgcttcatagcttcattttagccaaagtgatgctgcttttcatcattatatactaggttggacattagattgtattttctaaaagggtgcatagctaaatgtacttttaataagactgcacatatagctcaactttcctccagtccaggaatttttttctacagtgtcttaggccagtgataattcactcaatttctccaactctaccaatgaggggctatcaagtcagtccagatctatggagagactgaccataccagtcatcttaacagaggatctactaagaggatgctaaggagccattggaaggagtaaagagagcaccaaactccaggaagcagccataacctcttgggacagaaacaaagggaagaaactgtaattaatgcatgaagcttagtgtatatatatcatggatatatataaaggttgattgtgggaatgttggaggaataacagaatgaagtctgctgttgccactgggaagaatccttgttgggatgcagctagcaagtgcacagcccttggaggggttagggcagcttttctcaacccatggatcatggctctttggggatttaaccactctttcacaggggtcccctaagaccactggaaaacacagacatttaagtttggtaacactagcaaaattgcagttatgaagtagcaagaaaataattttatggttggggtcaccacaacacgaggggctgtagtaaagggtcacagctttaggaaggtggggagccattgggttagaggatttcctcaggatccctcccacaccctcagtctctctcctttaatttgcatctagcagtctagcaccggtatgagtacgcagtagaccgtgatagcccaccgaggatggggaaatgttcagccattcttaccatcacatccacagcacaaaagtgagggacgccagtgaagctgagactggctaatagttcacacaggaacaaaccttcccccaggatgttttgttctgttgccgaatccctttaaacaagaggcaacagcatcagcaggcaagagaacaaaatcccttcccctcttgggaggccgactcatcttgctttcccaagttttctttgctcggggctgagtatactcagtcccttcaacctgccacaaggccacgtgtggacctcttggctgtcatctgttggacacctgccagcctgtcagcatctcttctaggtgcagttctcagtttgtcagtatcccctgaaagcattcaggacatgcacattttctgtcttagcaattatacttcaagggatttatccttaggaattttcatggtttgcatagacatttagccataacattattaatttcagaatttcttaaaacatggacatgttcaagtataggcagttggttttgaatgtagagtatccagcaggtataataaataatgataaagaagacaatgtaacaatatgggagtgaaaattacgttctatttttagggtaaaagactggttagaaaatggcactcacagcattgttgaggtttgtagtccacatccacatttaaaaacaaagacaagcagatatgtaccaagtgtctaacatgcagtgaccattttgaagtggagatattatgggatgcttcaggtttttttttcttgtacgttcaaaatagtttacagtttccttaactgtaaaactctttcctagcaaatttggtttaatttggttttcagagtggggggtatagatgcataggtgtggtcagagaagccaaacagtatagctataagtacacactcacttttattacaaaaacagttctaggaaaaccacctaaaagggcattctctacccttctgttttcatctgcaactgtatcattccacagtaagtctacaatcatttaaaattcattatattttctcctgtggtgatcacaatggttcttataattcttgatattcaagtttttcccaacctttccagatttcaaatgaattgtttaatctagttgttagtttataacttatagcccctaggaaattgccattttaagtataaaattctacagtttgactattgtattgttgtgaaacttctacgctagttaacacaagttgttccatcacttcagaaagtgtccttatgtactctgcagtcagtcccctgcctcagaaagtgtccttatgtatgtcctctgcagtcagttccttgcctcagaaagtatccctatgtcctcttcggtcagtccccagccacctctggaccttgacaacctcttctctactatttcttactatagattacatttgcctcttttagagttttatgtaaataaaataattcaacatgtaactcttttcctagcttccttttctcagaaaaagcatgttttaagtagctcttttcttcttattgttgagtagtctttaaacacgtgtttccaattatcaggaagaaagtttctttaaatatcaaatccaaaattaaaacccatccctcagtcttaagtaagtagagattcctattggatatcttctattttttaaattatttctaaaagtgtaactgaagtatggatattatatataataggacacgaatttaatgagtttgattgtgtgtatacatccatgagaatagcaatacagtcagaatactaagtataactgccagttttctgtgtggtgtgtgtgtgtatatgagagagagagagagagagagagagagagagagagagagagagagagagagagagattctagacctttcaattttctttagattgtgtgtgtgttgtgtgcatgcatgtatgtgcaccacatgtgtgctagtgcctgaagagaccagaagaaggcatcagatgccctggaactgtagttaggaatgattatgagccactatgtgtatccatggaagcaaaccctgctcccctgcaaaagcaacacatgatatgaaatgctgaactctctctagccactcacccccacacatacccatctcagtcttttaaatgctcgatatgttgttgaacatattcatcattattcttactttggatgagttgcttgcttgatgagaagttctgagtccttttctttttatcatgaagtttgcattggcagtaagggttactagagcaacactgtatactgcctctagctcttggaatttgagtttctgtatgtgaagaatctagaatattgataaatatgttcttactaggttggcctcagctctgaaattctccttaatcaagggaaagtggggcccatacaagggaagggatgggacatgggtggaattgtatctgaattacttaagatcatgaagtttgaacacggcagccttctagaaatcatgagcagaaagtaggtgtgtctatctgtggaaacaaatgttcagaaaagaaaagatctagatatttggaagtccttggtgaaaccgaggcaatgatgtcatgactcaagtggggtgtttcatccgtcagcctgggctgattggagaaccacactggaatgacctcgctcaggaattgattctggttttatgatactgagggcaccatgcttgaagttagcttagctgtacactaacaagtgtagcaggataaataaaagacccaaagacagatactggggttcaagcttcaagctgaagatcaacgaagcaaagtagccacgccacacctcttaactctacattaagctgaaagggcttatcctgtttctacaagctctccaccaaacctcagactgctgcctctcctcagtgtgtctgtaaaatcaatatccacacgagactctttgctttttatatctccttagggctggattaaatgtgtgtgattccaagtgctgagatcatctttgtgtgagctgtttctctttatgactggatcaatttcgtgtagtcagtgtggccttgaattaacagagatctgtctggttctgtctcttgagtgttgggattaaaggtgtgtaccaccaccgcttagcttccatagttagctagtgtggctgctttgctattttgatttccagtggctttaataaaacataaacaatgtatcgccacatcctttggtttcccctcccctttttgatccattcttgaacattagagaatctgaaacctatttggaaagacctggcagctagaacacataacaagtccctaggcaatttggatttgcatggaggtttgtgaagtactatctgaaacatcaggcatccatccgtgttaagatgaatgtttctagcccagctgtagtgatcatactttatcatggcagatgaatggatcgctgtctccactgtgggatgggaatcagttggtaggcacttaaggaacaggtgtgtagcagttgcaaattaccaggctggtttccaatttgtgattggcagctatttttgcatccccaaagggagatgcatacttacttaaggagccagaattcttaaaaaaaataaaaataaaaaaacctcatgaaaaagcattataaacacatgcatcgctctttagaatctagctgaaacacatgatttttttttttgataagagcttttttattgctaatttgggctttctgttctctttggggtagtgagtgaactataaaatgatgagtgtggcttggttaggtagctcatgtatatcacaagtcttgtgtttttaattcattctacttacatagaaaagaatgagttaaaccatcaccactaaggcacaatgacagaaccggggagaaataagaacagtgcttaggaagccagcactctggcctgtgtagaaacctctatgatgagcatgctgtcttgaatcaggagttcatgcttggcgtgacttagcagcaaattgtaaaagcgggaacaatgccatgttttattgacagtgaaaccatttcatacatgatatctaaatactgaaagttcaataataataatggctatttaaaattgccttggaaatttttcagaaaaccttgtctcccttccccaaatcaacttgttacttcaggacattatcaatgatcagaagacactctgaccccactgtcactggtgtagaatggactagcccaccacacaaaaacatgagatgctgaggtccctgggtacccattggctccacttcataggctggccttctctacagatgttcaaatcttgcagtgactgtaattaacatggagccactctttttagaagatttgtgtatgagcccaggctgagaaaatggtcaattctagataatgtcaccaagatgacatctgagaagatgtgtaacctggcagaaatctcctgtgtctcaagagggaagaaccttcagacagagtagcaactagaaagtggggcttccacagaggagggctgcctacacctccccacccttcttaatgctaaatagtggtgggacctaaaagtgggagaatgctaggcttcaccccaacattgcacaggcttccccccaaggcccatctttttatagagtggtcttaatactggattgcgtgtctttcgctgtgttatggctttgtgagtatttcaggttgactctttaaaagagacttctaaagtgagagatagccttgccaattcacagaataaaaatgacaaattaggaagagtgagttccaaggagaatgggaaatgggaaatggttttacctctggtggtctcggtcctgggagcagcaatgtggtgtaagagcccctgggagacagggattgtggctgctgacactttagcttttgcatagcattctgtttgttaaccttttagaagtcagtgtctgagacccaggatagtatggttaatattactgaggattttagataccagtaataacagctcatttcccgaattattcagtcccaactgtgtcatacctcattacacagcaggtagttagtttggcttttggaacagtcactgataatacttgctgtcctcatataatcatttaggattatatcagtaaattcctgtttattatgaaaaatgtatttgcttggcgcgcgtgcgtgtgtgcgtgcgtgcgtgcgtgcgtgcgtgtgtgtgtgtgtgtgtgtgtgtgtgtgagtagacaggtgggagaatacctgaatctagaaactcttaagtcttctattttgacttacttccctattcacattgacttgggtcagtgattgcctaacagataccatctatgtcctttctcttagaaggtatctgtaggatttgaagcccctgcctcccaaatgatgcattgtcttcccattgaaattcaagaaatgccatgtaacaattactcattcctgtgtgggagctcctggcatattagcatgctttgaaattgaaagtccttatagatctctttgcataatattggccaaagtataataagccataagtgaattttaaaggaagaaaaaagatcccaggtgtaaaaggcaagaataatgatcaaggctgtggtttcctgtgtggggctgtgtgcatgtctctgaatgctaacatgagacacataaaacagaaaggctgtattggggagccccattactgtctttgacaggcttctctgtaaataactagagacttgctggcaatgggtgatataattggtgacttatttatttaaatatttaactgttgtttactgtctctggggtataactgtgagtatttggggaaaattaaaaattccaccagtagtcttgcacttacgtggtgtgtacagtttattcctcttccatgcacacatctcctccactactcttgggatttctttagttccagagtgtgtggaaagacagcaatgggtgtaaggacatagacccctgagagactgtatttaacaaccagaatcttttagtgaatatttatgtgctcattcatcttctcttgtgcaaagctcaggttgttctgaatcgctatccactaaattgttatgcccacaagaatagttggtacagaattgatcactttggagattttctataaaaatcttgccatttgaaaaatctgcaaatactgtttcaaccataagatctcatttcaatgataataagataatttaacaggtagaagccattatcacccaagcctgatgcccggacttagattctgaactgacttgacacatgacactccacccctcaacacacacacacacacacacacacacacacacacacacacacacacacacacactttagaagacttgtcgtcagtggagttcccaaggaaagaattaaggcagagtctgtatagatccagacttttggaatgacttgagtgtcttgattataaaaatgcaagctggaacaaatgaagtgctggtcacctgagccttggcaccttgtgttttggtctaggtctctccttggccctgatggtgataaaaatgaaagctgtcatcccaggcttccacttcagatggaaatttccagagttacacctcaagtataacttgagtccttggagttaatttttcaccctttaaaatttacagtagtattttagagtgatttctaaatctttggtaaaaaaaaactttggcaaaatagcaaaaacggtcataaaaaggcccttgacaaaatgtaatggcctcttatcactttaagtactcggttacagacaggaggaggaggaagaagtacatattttcctttttaaggttcttttgtttcaacttggaaggaggcatgttgtgagaaacaaatcaaacaatgaaatctgccccccccaaacaaaacaaaacaaaagaaaacaaaacaaaacaggatttttctgtggctttggagtctgttctggaactcattctgtagaccaggcgggccttgaactcacagagatttatctgcctctgcctcccaagtgctgggattaaaggtgtgtgccattaccacctggcaaaatcaaacctttctgaagctctgaaaagaaaaaaaaaattaaaagcctagtatttgacatttgactgataccttgacatttaaaaaaaaaaaagtgtctgtgaaaatggccgtaggcagttccaaactcagaagtagggtatgtgaatggggtcatgtgctcctcaatctgtctatcagtgattttacggatagatgcctcatccagtcttgatctttcctaagtctgtgattctttgttgtctaagaagctgatccaagagctcttgcaccaggaggtaacactagtttcaggcctggaggccaaataggaccctaaggagcaagtgtaagcctcaaaatctggaagacagagtagccaattaattctgccaactgtgacctttagagcattttataaagccagtccaggtctcagaactctcctccgctcagcaggctccttacagactcaagagggtattttgtttgtttgtttaattgagccatctccaaggtccccaaagcttcataaaaccgtgttttgttgtatttctgctaatcgtgtacatttattgaactaactctactggctggacatgaatgagcctgttactttcctagaccctagttcttcgtatttaagacgaggatgttacaccaccgtgtgtggcgctcagaatgcttcttctttttgatatttcataaatgtttgacatagatttattgctcatatctgcattgtggggagcagttgagtaggcatggtgaccaggtgtggcatgcacagtagaaatgaaaacagaaagaacctgtagtggtgagaaacatgtctcttgacagtattctttccaggttactggagtctgtctccatgagggaagatgtatgaacagaccacattggatgacaagcagggcctccggggttggctccttggataccctccatcttggagcctcaaggttttctccaatgtttatgagttttgtttttggttttatagataatgtatatctatatacatatggaaaaggtagaaaaatataaagaagaaaaatcagttcaaactttcttcttaccgtgtcagctgcttttctttgcctatatgtagtttttttttttttttttttttttttttttttttgtccagtcctactttgtaacttggtaggcataaaatctgattttaggttatgattaatttttcaaattaaataattatacagcttgtttttctctaattataaaattcacaagtggaatagttctgattctctataatataaaactagaaatatagcaagtgtctacaacacccgtgcaactaggaataggtttttataataatttattattttcattatattttagatttttaattaaaaacaattttaaaattttcgcttaaggttttacaatcttattaatggcattcaattttaattagaacacttctgtttctgaatccatgtttactattcaccctttaacactaacactgtatttgaattaaattctttttttgtttgtttttcacggcagagtttctacgtgtagtctctgctgtcctggaacagatggactcccaagtgctgggattaaaggcgtgtgctaccactgcctagcttgtgtttgaattcttaattttgaatactttctctactagttggcatgtttttgagtatttgtttcaggagttagagtcagtaggcatgtgcatactggtgggatatgctaactagaggctaggtggctatgcctttaaaaatcctcagggtcatagccactggtatgttgcttccacttaggaaatgacaccactgtccatgctggtgcatgaaaccctaagggaacacagtggggcacagaaagacatggaaggaggagggggacttggagggagagggacaagcataagagaaggatggggccaagaggactccaatacaagaaaattatacatacatacatacacacacatacatacgttatgaaattagttatttttatgaaagcatacacagcacaattttctctgatggctgatttcccaaactttttctgagtaccaaacaattgtctaatgtaatatgagttcaaataggtcttaataataacaacccaaagtcagatattagggatgaaagctgaaagatcagagaagcagagcagcaagccaccagttcttatgtctaggaaatcctcagatcctctctccacccagccatctcacttcctgcctgtctgtacagacctctagacctctatggttagcgagtggctagctctgccctctgatcttcaggcaagctttatagagtataaacaagatatcaccacagcctaataatcttatcttttaaaaacacaattgctgttgcttcattatatctgcattcatgcagtggagtactccgggattaagtggttctttgcttttaacttttatctgcagttttatgcttttgctttttcccttgatgaggtctttttttttttttttctccctggaattcatctcctacccttgtctttatttcattttaagtttggcctcttgcccttcctccccttttttattgtctttaggaatttcgttttatgttttcttgatactgtttggtacagaaagtgtgcacctgtattggagatgtctggttcatctctctgagcaatggcaaagctcactggcggccggaggttcagagctgttgaccagggagctgtctgcatgcccataggttagtgctattccccagaaaggtgtctattgggtgtttggagaaattcacagcagatcaagggcctttgggactctccctcatgccaccacagcaaaacaaaggaagaaacacacttgtctcttgaatatttccccagaccactcttggcagagttgcttatgcttcaggtgctgctggagaaatgtttctaatgaccaaccctagtatctcaagagcaagatgcacaagggtgatttttgaaagttaatggtattttaatagcagatacaaatgttctcagaggctcaggtgaaagaagcaagtggtaactcatccttgacttcaggaggtcactgggaaagagctttggctgagcaaagtgtgtaggaatgatcatgtgatcatcaagagcaacctgggaatatgcacttcgggggaggggagtttccactcaggggccttcctgcctggttacttgagaaagcttagacacagtcacataagttcctaaataacccaccataatgggggtgttgatctctgaagttctctcccatttatggtccattccagaaagctggtgatgggataaaccttacctacaaaccagtatcatttgctcttttattaaacagaaattactttctatttgtggtggggatgaaagcaaaacaaaacaaaaccagttcttaccttaaaggaaataagagagtttatgctggagccattttgagtgacgatgaggctaggaacacaaatttagattacccccaaacaaattccatgttccaatgtagaagcagctcagtgatgttttatacagaataaagacagtcatcaatcaaggcaattataaaatgcaccagtgggtccatcaaagccgtggttgcagcaagatggaaaaagagattctgtgggtctcagatgctacctggtagcattcttagctttcggtcattcttagcttttgggttggtagaagctagtgctttcctaagttaatagttttccaaaggttttttatctattagtcataggatattagttctgatacagagttggacaaggaatagctattcaggtagctaatgctagccaaggctagcctctggacttccaacatttcagtgtctacgtcactgaagttttaatcagggaagcagtctttgcagacagcttctttctaggaattcttgttcacagtggcatgtgaattttccctttcctttggttggggccggtgtctaaggttttctcatcttaatgagattctggaagaaggcagagttacaggtatgtttatactactgtctgtctccaggaagtgttgtagtttttttttttgttttttgttttttttgtttttttgttttttgtttttggtttttcgagataggttttctctgtgtagctttggcgcctatcctggcacttgctctgtagaccaggctggcctcgaactcacagagatccgcctgcctctgctttaagagtgctgggattaaaggcatgcgccaccaacacccagcagtgttgtagttttcaaagtgccatacatgttttctgataaggtgttttaattttaaaagtctagtgttttaagccagtgtctcctctgccctttctcactgaagttagagatctctgacaccaactctggctaagatctactgcacataggatttttaatggatgctgtgtatacatgcattgccggcaaacccaggcatcttcaacagaccttcccaccagtatattccctgcttgtcagctgagttaattaaccgtcaggctggcttgtagttctagaaacatttggatttttcaactttttttttttctgtcctgaaggagctaaacatggtgagatcccgagcactctgtttagtaagcctgtttattaattggtggaacatgacatgtatgctacttaatatattaagacagaagtgttgggaatttgtataaaacaaaccagtttgatattaaatttttaaaaacgacagaaaatttctcgctttggctgtttggatgttggtatagaaagactcaaaaggaaggataaaaaatcgagtgatttatacagtgtgtgaaaataaaataaatatagtatttaaaaatatataaaacccattctgcttgttctttaatcatcctttgtttgagggctccttgtttctgcttcagcttgggctttgttggtggtacagcaagcacctgggcaggggtgcaccatggagttagagaaggggtgcagagccatgtacccaggaaaggctagtttgtgaaacctgtggcctgggggatcttcaggggaacaaagcaaacatccaggaaaaaaactagccaagctctctggttgtgagtagaaacaggatcaaatatgttaaccttttgtaatacacagaatccaatttcttctcgttcttaaacattaggtagcattcagatttaatttcctggcctttctctgttgtgccagatgatggacagtcatattccagtaacatctacaactgtctagtgcaatggttctcaaattgtgggtcttgacccctttggcaaaacccccattgtcaaaaataattatagcaaaattagttatgaagtatcaatgaaataattttatggttgggggtaccacaacatgaggatatgtactgagggtcttagctttaggaagtggagtggaacccaggataggtacatatgtgccaggattgtggcaaccatgcaaagtggcctcttgctatatttccctcaattagctctcagattcacagtctgaaaactactttcctagatgaaaaagggaaatgacattggttagttttgagcactgttctagagcagggaaatctttgatctcatgccagttttatgtgatagagtctcatctccgctgtgtaaaagctgtagagttttggtagtcatatccatcaatcacttttattatttgtggacttttatctcatttaggaaagttttctttattttaatatcaaaagatatattctgtggtgttttcttataatatttttataattttcccttgacctttgtctttttcttgtagaatttatttttgtgtataatgaaaagtatgaatatagattttttcttcaataaatgtcagttttcttagcaccattaagagctgcccttttcttactgagataatatgcatgatatatcataaactatattctaatttttgacttatactgttcatttctttttggtgttgatctcattggcagtgattgagtctctacctttctggtttttttgggaggggaagtatgtcttttacacatttgacacttggctcaggacattttctattacacaaatactgttatcttatgatcttctcacatttatttcactgcctgttagtgaatacttccctttcttctctctctctctctctctctctctctctctctctggattataatcccattttactttcactttaattagttttatagaaaagattttggttatgatgactttgtgtctctgcagtctattgaattcttgtgcatttatttctagttgatttgctaggtcagtggttctcaacctatgggtcatgaccctttgagggggtctattgcctctttcacaggggtcacctaagaccaccagaaaacacagatatttacattatgattcataatagtagcaaaaatacagttaggaagtagcaacaaaagcactttcatggttggggttcactaaaacatgaggaactgtattaaagaatctctcagcattaggacagttgagaactgctgagttaggacatttatactcttttcaagtctttcatttgcttgtttacttgcctgatgcaggacctgcaacccattgctgtgttctgttggtgaagtaatactcaacatgcttatctctcccccaatttcagtgaagatgctttcagtctatgtttaggatcttgacttgaaattgtgacactttgcaaggtatttcttagtagaggaaaatcttatttttaaatttgtaattcacatgtagtagtgggacatttttatagggcatggtgtgattttttaatgtaggcatatatgtagtgattaaacaggcagttcttagcatttctcactctttctgatgagaacatttggaatgctgtcttctagctctttgtgaaatacaccatatagtgctaagtataatcaacttctctgtaacagaacaccgggatggattcccccatctagctgtgactcagggctcacccagcagcctcctttcgctcctcctctccgacttctgctgaccagtatgcagtctccacttctctgagatcagttgttttggattctacatgagtgaaatcatgtgacgttcatctttctgggcttgacttacttcatgtaacattctttcttcctggatccttcatcttggcactaatgatgggattgcattattctttactggtcatgggtattctgttgcgtatgcataactcattttctctctgcattgacctgtatgtgttcaggttcaatctgcaccctgactgttttgaatggggcttcagtagacaggggagtgtacacaccaaagaggtttataagcctcagatgacacactcattttgttttcttctgctaacatacgtgggcagagtttgagatgtttgataatcattcacacctggactaaactgctcttggtagtaggacttggctttcagttaacctgataactagcaggctaagcattttgctcctcctccagtataatttgttatgcaactttgatatctcttccatgctgagaaacccacattgcatgttctggagaagcaggaattcactaagtgaggagaaaaaagaaggataaataacgatcaagggaggagatgccatttccctgtggacctttcctcttgagagtaccctgagatgtacacagcacatttctagaagagcttgagataaagttgactgagaaaccagccttcattgctttgtgcaaaagtggaacttagtttgctttctgtatattaatccagtacagtaaggatctgagagatgtaggtgggcttactccgagtgcttagtcaacgtactgacaaggtttaatctctaactgtatatgcatttactgtctgcctcacattactgcatatgatttcttaaatttttttcattttatgtgtatgaatgttttgcttgcatatgtgtctgtgtagcatgtgcatgcctggtgctcatggagatgggaagagattctctggcactgcagttatggatggttgtgttatcgtgtctctccatttagaaaagtgacaatataattgtaaaatggagagaaggttctgcattgttcccagggctcagatcctgtggttgagaaaagtgagagttctgatgtcatcctcaaaatgctgaaactagttgtgaattcttctgttttttgtttgtttgtttgtttgttttcttctggtttttaatgaaatagtagaggccagcctcaaacttgctacagagttgagggtggctttgaacatctgatcctcttgcctcttgttttgcaagtgctgggattacaggcaatgtactatcatacctgctagaaataaactctgactaaaactgtggaaacactcagggccaactcaattattgatcaggtaacacagtgcccactcttaaaccggtggcagaacagtagagacaagctcttcctgtggacagatatggttaactcagtctctgccatacctttatacaaaatgaaacaaagtaaggcatacaaggtgtgaagaaacagtagatatgactgttacccaagagaagtggtcaatagacctagagacttgctttcagagtattggacaggttttaaaggcatgtgctgaaaaaattaaggagtgaatgaaaaaaatggagggtagtgtgaaaaacaaaagggaattccgacagagagatggcaattttttttgtttgttttggttttgtttgtggtaagggctgagaagtatgccctggaactctcagaaagttgaaggggttactaagcaaaggaagacactattgaataggaagctggtttcggaagccagtgcagtgtctgtgaactctctcccatatgctcttgcttcttattgtgtatttgtgttcacacttgttaattacagaattacaaaaatgaatgaaaagaaaccagatcaattgagaggcctatggacatttcccaaggtgaggaaatcagaggcccatatgctcctggagtcacttccttttctctgattaggaagtttaggtgcttgtgacatttatggttttctacaatatgtgtatgcatcaagtgaagctctctttgtcttcagtccctggcttgctttggagagatcactcattcaaaagggcaggtgcaccagaaggaatgtctgagtgccaagcccagaaaagaggcacacacctatgggtatttttagagtattgtattttctttactgttagggctttcttttttccttttacaaggaaagaagatcaaggttcatagcaagggccatgtggtttttgcataagcccatcatcaaggttccttttctcaagttttctcagagaagaccatttttcttttcttctagcattaaaagtactgtcatgtctttgccaagaagtgtcaaaaggtccttttggtatcattgaaaagttgagtaaactatttttttttctaggctgcattctattgttccctaggaagtcagtttgacctttcttacttttttatttatttttcaattttctttcacttgaagaggagtgaactggttcacacaaaatgtgactttacatcgtgcctttcagtcaaggacaaataatgagtctgaaacaggccccaaatgcctgctgaactccagccttttctaggaggcgaacagtgctgcttttgtgtgagtgattatccattctaaaattgctcattgttcctctgcttctgtgccttcctgttctgctctttcaagcgctatggtatctttagtgcatgtattgcttagaaatgggcacaactggagaaaaatgcactttgaaattagttaggacctgcttcagaattagaggccagggcagagagcaactacagagccactcgttcaaaaattgttagcgttttaataaggcagcaacagagcattgaatcaagtatggagcccttctttgggaggggtccattggactacatggcttctacacccccgaagccagctctgggcttaggattgtcttgttttggcttctggttctttaactgtcaggaaactgctaggtatttgttataatcttgaatttaggaaaaaaaaaataagagcccaagtagagtgggagatgcttgcccaggctgtaaagctagacagttccaccctgcaccattctagggacggtagagcacatccttggtcattacaggtggagatgatgactgtggctttcccctgacagatggcagacacagtattgtctttgagcaggttagcttttgatagtaacacaaaattgctcttgggtaattaatacgtttttataaattctctttctagccattacttctacttctttctctttaattttatgtcctggagccttctgttagtatttcacagtccgtgtgtgtgtgtgtgtgtgtgtgtgtgtgtgtgtgtgtgtgtgtgtgtgtgtgtgcccacgtgtaccttacctgtttctccttcctttccttgttactgtattgctatgtggtttctcttctctcttcagccttcacttgtttccaaatgctcagcttcataggtcccctagggaagctgacatttgagtctcagtggaattctctttcatttttgtctctttcccccaggagtgttttatttgaaaccttcaattacaaatggcaaaagggagatttttagtgactgaaaaaagcagcctgtcagcagctggtgccatctcagtcacccttgaaactagtaccttaagaagcagtcctgtgtgaaactgcacacatggatggagtaagattaaaatccccaaggggacagatccattcccaaaccttcctgattagctcctggattcagctcctctgagctggaggaggtcttgggcatgtgctaacggttcccctagacagggcttgtgctgtgggaacttctgttctgaccctgttggatgccattgttgttctctgtggtgtgccctatagagccatgtggaacatcctcagaatcagagcctttggctggaaggggacaatattaggagtggatgttgcttgcaagtgcaactaaacaaaggaccggacattaaccacacacgaccatcctgtcaatcactgggtttcctatctcactaacgaaaaaggaatgtagtttcactttcttgataggccattcagactgaaatcacaacaacagaaaccctttattctttcattaatgcggccttgatgttcattttaactgagttgtacctgttaaattttaaaaggagggcaaacaactcatgtcacgaaagcttgactgtgtgagcttccttacactcccagggagacacctggttggccacctgtggctgtaataccatcgtggaactatagaaagtgtcagaaacttcagtctgcctttcctctgaaggcctgggaacacaccatatgataccacatctgtttcaactttgaaggtgaaccttttgcagggagatcccgtgagatctgttaacaaggtttaccctggtgagcaagtgcctgagaggcagctcctctgtcttgatctcctttggaagccccattgtctgtctgtgaacttggcatatggaaggtgttcactggaagactgagatggtcatgctggggatatctctggacagaataggaaggaggatgtgcagaggcacacttgatttcattgttcttgaaccgaagacgaatctgaggccagaatatgctgcttagtcacatttaacatctacagctacatcatttctcagaacagcccaggaaagagaaaacagactcctggaaagtctgttgatgccaaggatcgtgattctgtatactaagaagcaggaatcccagttgccctttttattcttggtccagattgtacaagcaaagggagagagaaacatccctgccattgccttctcttgttccagactagaaggaatcatcatctttttcctcttcctcctcttcttccccttctcatccttctcctcttcctcccctgctgctcccctcctcctcttcctcctgcacctcctccttctgagacagggtttctttgtgtaacatctctagctatcctgaaacttgctttggagacaaggctggcctcaaactcatagagatccaccagcctctgcctcttgagtgttgggattaaaggcatggaccacctactactgcctggaaatggcagaattttaaaaaaggaattaatgaaataattttttaaagccctagtggtggtttgaatgaaaatggcctccataggtccatagggagtggnnnnnnnnnnnnnnnnnnnnnnnnnnnnnnnnnnnnnnnnnnnnnnnnnnnnnnnnnnnnnnnnnnnnnnnnnnnnnnnnnnnnnnnnnnnnnnnnnnnnnnnnnnnnnnnnnnnnnnnnnnnnnnnnnnnnnnnnnnnnnnnnnnnnnnnnnnnnnnnnnnnnnnnnnnnnnnnnnnnnnnnnnnnnnnnnnnnnnnnnnnnnnnnnnnnnnnnnnnnnnnnnnnnnnnnnnnnnnnnnnnnnnnnnnnnnnnnnnnnnnnnnnnnnnnnnnnnnnnnnnnnnnnnnnnnnnnnnnnnnnnnnnnnnnnnnnnnnnnnnnnnnnnnnnnnnnnnnnnnnnnnnnnnnnnnnnnnnnnnnnnnnnnnnnnnnnnnnnnnnnnnnnnnnnnnnnnnnnnnnnnnnnnnnnnnnnnnnnnnnnnnnnnnnnnnnnnnnnnnnnnnnnnnnnnnnnnnnnnnnnnnnnnnnnnnnnnnnnnnnnnnnnnnnnnnnnnnnnnnnnnnnnnnnnnnnnnnnnnnnnnnnnnnnnnnnnnnnnnnnnnnnnnnnnnnnnnnnnnnnnnnnnnnnnnnnnnttatgagatctggtgccctcttctggtgtgcagatatacatggaagcagaatgttgtatacataataaataaataaaaatcttcaaaaaaaaaaaagagtagaatcttcagagcaaacaacccatgatgccaagtccatccttgcctccctttttctctatggatagagcaagctgcatttgtagctgcagattgcatggaccctgacttgattgcagaagacatccacacatgactcatcaagagatttgttaccttttcaaatcaggcacttttttataacttgagatatgtttgtttgttcagtgtctttgagaacttagaactgtggggaatctatggagttaatggaaacatgtggcctatactgttcacaggctctgatctgctaggaatcagcagttatcatggcggatgggacgtccaacctggtggagctggtgtcctagcagggaggggagagtgcctcctagggcccactatgaaagcttggggccgtgggcaagctggttgcaccctcctcatccaaatcatcttctttaaatactgcagaccttctgatggcttgtgctcaactgtgttttctctttgttccccttgctcatgcaaacagtaagcatctgattatcgttcaggagactggagggtagagtgtgctcttgaaggatcttctggaggaacttgacttttgcattgacctcagagaaggtacttggaggcttttatttgacgaagaaaacagaacaaaacagaatcaaagcctgaagcaaacttacctaaggaccttcagtaaccctcatttatttttacggcaggagcagaaacaagccagtcggtgtttgatggcctgtgtagccaaggagagacagagcttgaaatgcacatttgaaatctaagcagttggtcaaggggggcacttggggctatggtccttttttctcttgggcctttagaattagttgccatccatttttttttaatgaagaaagaaaaggaataaacagtgaacctcctcctgctcaattcttttcagccttctacaccatgaagagatttatccagtaaagaaagatcctgggatgtgtatggaagaaggcagaagagttatgttataggtagtgagagtttatcattttaaaaaggaagtaaagtagatcattgataatgaaacaaatgggaattcattgtaaaaatggtagtattgtggtgtatatgggtgcttgtgtaccagggaacatatggggacatgacagcaacattgtacagtttgctccttctgtgggctctgggtgctatacttgtatagcaaatgctttacccagaattaattttgaacctgaagtgttgtgaagagaaggaataatgatgatggcagagagtgttgcaggtcaggaagagtcagcctcagtgaggttaacccaaaggttctgagggggtgtctagtgctctgagctcagatgactcagagaagccatgtgtgaccctacaccggccctcatgctatttaatgctagttagtaactaaacatgagatggcatataactataaccccagcacttgggaggaggagacacaaaggtcaggagttcaaagtcagccttgagtacataatgagttcaagactagcctagactttatgaaatcctatctcaacaaaatgaaacaaagcaaaataagcaacagcaacaaaaagtagttgtaaaatacagcagcttctgtagaatacaccttggcagtttctcactaagttaaacatgaaatatcatgtaacccagcaattttcccctagcttatattcataaaggaattaagataagatgttcactagaaagttgagtatgaatgtacaaagtggcactatgtacaacagccaaaaaataaaaatagcctagatgtctattgataagtaaatggataaaacacagtggtatatccggacaatagaatgttactcagtcatgaagtggcatgatgttccaatgcatgctgaaatatagatgcatctccaagtcactctcatgaaagaagttagttagacacaaaaggccacatgttatatcatttgacagacagtgaacatatcagtagtaggcaagagattgttgagtggggaaaaggacatagactatggctatggtgtttcccttcagagcattaaaaacactctaaaagcagaaagtggaggaggatataaagaattatgaatctatttaacatttttgctggtttttgaagcagaatttctctgtgtagctttggagcctgtcctggaactcactctggagaccaggttgaccttgaactcataaagatccacctgactcttcctccctagtgctgggattgaaggagtgtgcatccattgcctggcttgtattaagcattttattctctcaagttaagatgataaatgttttgtttaattacgcaaatagaagtaatacccaaatatatctttgtggtagtttgaatgaaaatgccccacccccaagctcatatatttgaatatttggtatgtacttggtcctttttcctccttccctccctccctccctccctccctccctccctccctccctccctccctctctccctctctctccttctctctttgtctgtctgtctctctctctctctctctctctctctctctgtgtgtgtgtgtgtgtgtgtgtctgtctgtctgtctgtctgtctgtctgtctgtctgtctgcttcattgttgtctcaagattttgtgtttcagctgtgtgcctgctaccatgctcccaaccatgatggtcatgaacttaaccatctggaaatgtaaagccctaacaaactcctgtcttggttgggatgtcttctcatagcaatagaaaagtaactaacacaacacttaacactcttctatgctgagaaacatttgtacataattttatggtctcatttggtgctttatttgagggtggatgagaaaatatttcgtttggcacttagatccacatcttctgcaaggagggataaattaaataagttataaatgaaggagatgcatttatacatgagtctcccccacccacacctgagctgtatggcagatccaacctctttttttgtgcagtagttcaatcttctaagggcaagcagaattctcacttgggagcttattgtctctgcttgatgtctccgtggaaagggaagtcagtgggtgaagagcaggtgtgagggggaggtggtagactttgctgagagcatcagcagtgaacctcggcaaggggagagtttacacaggagtgacaagactctctcaagtgtggatgaaagcagcccagaggcagaagagggacagtggccagaaataggacctggatttagtcctgacatcacctgctgctaactttcttcttactttgtggtcctaggatgttactatctctctctctctctctctctctctctctctctctctctctctctctctctctctctctctcacacacacacacacacacacacacacacacgataaaattagtacttttcatatgcctgctacccacactaaagccaagtgaaatgggctacctttgaccaaactttacagtcttagctactgtagtcatgtgatatttcttagatgactttggtaagtcacccatctgctgtttcttaggatgggagaaactggtaataattgtgtagcctagaaaaattatctggtaagaatgaatgtcccagtctttaagagaatagctgtgaagcaatatgccctcaatgtcttaggtttttccaatcctgtcatttctctgggtgacgtaagaaagtgctggctcaagttctttttgcttcttaatgtgcctcagatctatatactaatcagaggtatgtttaggcttgttctgagaagggtatagctccatacatttaggttgagatatagagtactctctaccacacagatttagaaaatattgaaattgatgatttccagtggtccagaatgttccacaacttgtaagtggtgaggcctccccttcctcttcacatttcctttttcttaatcttctattacactccacattagaaattgaacaatcctgtgccttgcttatgggatctttaaatgtctcgataagccaagtgaaacaggaaaagttaggtgtcttctgtttggatcccattgtcaactttcattctgatcccctttttatagggacaaggagaaggagagctgaaggcctcacaggagattatcaagggaagcttccaagaaggtccctgaaactcacacctctggttatctggtgtctaggctcctttatgtcagagggagtttaattattctttacctggaagaaacacatctctacagtttactgtgaaactttcagttcccttctcgttatacaggccctagcttcaggttttgcattttacccatttgtctatctcttcttatatggaagcccagctctaacaggagagaagtatagatagccagactggtaacggtggaacaggtaattttcagtggcccctaatattttaagatggagtaaggggacaccaaacactgggaagacaagtatgtaaaaagtgcagaccctgaacaacacagcttatgtagagtctttaagtctcgaggcaatccttagagggttcctatgcaggaagcacactcccttgtgtccattatcatgctggaggtggggatcgggatcgggatcgatggatgtgtgaaagagaaagacggaaggaaagaaccacagtttggagaaattcagtgcagggcactgtgccaggactttggtgacttcataacctttaggagcttggtcattagcataggtactggagtcagaatggactcagatgaacaaggtcctaggcagccacatgtgaacttgtgtgtgcttgaaagagagagagagagagagagagagagagagagagagagagagagagagattgtgtgtgtgtgtgtgtgtgtgtgtgtgtttttcatcagttctattgtaggaaaactgaggatggatcctaggtggccaggccagtggaaggggattttaggggagccataggggttatttattgtatggatatgtcagcaaccagccacacccctgggggggggggtctctgtgtctgtcttccaggtacttcctgtcaagaaggaacctactttaatgttcaagacagctgctggtgggtggtggtggtcaggctcaggtggtcaggcttgtgacttaaatgacttgcttgtgtgctgccttgaccagacctaagcagtgctcatctgaaatctcaccttgctagacccctgtcctgtgatctgaaagcctatagtacccagtgcattttcaagcctcctgattcatttagaatgggaagagatgctgagttctgtcttaaatccatcttggtggccatctctaagtgaaaggatacagtaatcccaccactatccagagatggctttcaaggaaccatgcattcccgtcttcagcaaagggctgaggtgttagaagtagcagaatgctgggtagtgagatgtctgtgcagggattcttatgggtatacaggcgaggaaaggcccgactggctagtaagtgactaggaagacacagctttaaaggagtaacatttcagaagggtttgcagtctctgaaaggactctcaaaggattgtggttttaaaagatgcttaagatacttctgtgttttcttctcatcaggccattgcctccagagcaatttagtgcaattcagaaataagcacacagttaactaccataatgtggtgaagcaagctgtttctgactgtgcacgctaactttttctctatttagagtatgactcccattatgtccatgctgagccatgacgtgactatgtagtggccccttgtaatatcagcatttgaggtgggctagtcacatagatcctcagggtggtaagttttcaggcagctcacagctagacacatggctttgcatatttccctaaatgttttgttctcttgatttccatgaatatattgtgaattaaagaatgctgtctgctctccatggttgatttaaatgtgagttttgtttagctccagttttctcatcatgaggtttgctggagggtcacagtagggtcttgtttctgagattatccctccttttgtccagggtttggatgaatttagcatgaacattgaaaattatactgagtggacagagcaacagttgggtctctttgtttgtgggttacattgggaaacattctgaggccccttccctcactgtggatttgagttaaagccatgattatcaccaagagactgttgggaaagttggaactagagaccaagacctccatggacctagcagatacagactagctgggttgtgggggatgtaactgctcctgcattagctggattcagggttggcagtgtcttcagtatctgtcgccaccgttccctgggaaatggtagaactaccagacacatatattacatagctttcttcttaggaggggcttgcaagtcttttctggataaaggaggatggtaaagtgggataaagaacatcttttctttcccaatagaggttatcacacaaagattgcctgtccttacctatgctataaggagggacttctctacacaaagaaaggtcgcaaagaaaggtcaggaatgctggtttgggacccaatcaatatccagtgtcaagtctgtcttcaggcattacctggctctgtgagaatcaggccaagtggcacagcaggtccactgcctctttctgtgccaacatcactatattaaaatcttcccctagatagaattccttgatatcagtgtctgtgcatgggtcacttctgtgtccctgggtccccagcatggcacccaggtagtcacaggcatattccacaaatatttgtgaaaataaaattgtaagcaaatgagcaagatggagggttctttaaaatggtagataaaggtatagatttaaaaatccatttttaattggaagcaataatagggttttgagacaactgatatgatgagatcaggattggaatgtaaaataagcataatatgaaaagcatagacttttaaggtttaaaaggatctcaaaggaagacccaatccaacattgtgtcttgaaatctactttctcctgtaattttcccattaatggtagttgggactttggacacctgccaagacctattttattttcacagtgaactaaaatatcctgtataactttttgtccctaatttttgtctcatatagatacctaaatgagatgttgccttttggcatgtgatcaccttccacttattgcaggcagagtttccctatgtttgaccagtaaaaggatgcagttccttcctctgccccttgcctgctgttacctgaactctgaatagcacagcaaatcatagaggtgagggggaagtccaggcccacctagaggagaaagggctcatcctgccattgttactcttgaaacctcatatgcattaaatgcagcttatatctctagctgatggacgctttcactttgaattgtagccaggtttctacccctgaaaatgatactttactctgctacttaaggctgacaccttgtttctccagcctctagcatagttagttgcctatttggatttttttttttttttggtttttcgagacagtttttctctgtggctttggagactgccctgggactagctcttgtagaccagactggtttcgaactcacagagatccgcctgcctctgccttcggagtgctgggacttagaggcatgcgccaccaatgccctgcacttatttagattttttaatcccctctttcatagtgggtacaaatacagtaagagaaccaggaagatgcattgttgaaacccaaattttgctacaacaatatgatctaaggaaacacgagcttaagctgatctggccaattttgagtaaaatttgctgcatcctggtgattatacttttcctggcttctcaggaacagcctaataaaccatttttgattttcccacaagattccccaacgtgacctctatccagctccttcgtgtgacaaacctaagtgacatttgccagtcctctattttttggacatcttcattttcccctgagtcctcaaaagcttcctgatggggcttgagccctagtgtttgctgtggtagggcctcataatgtctctggtttgattctggggctatgtttaatttcacactaagccagttgtctgattctttccagaccttggctgttggggccagacttacctcccccgcaagttcttgacattgtatgtacaaaaaaagaaaaaacaaaaaacaaaaaaaaaacaaaaaaactctttttgtaatacaaattccagcacatttatctttctgcagctttccagctatgcaaactgcacaaagccctgtgtatgttagtttcttccatttgcaagagagcttcctttagcaatagggtttattttaaggatgtaaatggaaataatgacactaccccaaagtaaaacccgtaaagcaaacaacaaaaacataccaaagacaaaaccacccccttgcaaaccaagaactgagtcaggaaactgaggactaagagctgcagcctctgaggcagttacatggcttatggccatgccataagcaccagctgttcagggaccaccctgccccaggtagaagacacagcccctccattcaccttacatagtagcctacactacaaagcaacatgtggatgcctttccacctgggataccgatacttctggtgttatcaaatgttgatctggaaaccaggtggtgctggctacatgtgtacctttggtcccagcactctgaaggcagtgacaggtggatctctgtgagtttgaggccagcctggtctacagagtgagttccaggacaagctccaaagctacagaaaaactctgtctagaaaaatccccacaaaaaaaaaagtttgtttcaaactgggtgtgattgtgtgtgactcaaagcccagtgctggagaggcagagacaggactatcccatggggcatgggcgactgctggcaaatgctgtactggaaagccaaacttgagatttccagacccacaagtgaactccatcccattcttgtcttacaatgagactcttttctctcttgtatgtgactccgacacccccaaactgaggcattgtatgggtgcaaatttatcggcctgtctttctctctgcttagagtagaggacccctccccagccagttgttactgcagggaacttttggtccatgggttgcttccgtctagctgtatctgaatcccccccccccccccatgaagcctcaaaccaaaacttctcctacactccaactctccaactcggtacttgcaaaataaagtacagcaagaaccccacgtgtcttggcttacctgttctcccgccgcagaacccaaaccagccttctttctccacatcctacctttcctaccttttaaaaaattaattctgacagaaccacctctggcctctttccagagacatgaagttttactgagagtgattgagaaggaaggaacaaatgggtgtttaaaaggattaaaatgcagagttaaattgagaccttgagtggggttggaaagccgtggagcatagagagctgtagctgagagcattgtggctctgcagctggggagagaagccatttgggattctcaatagaagaatggctatttcttttgatagtccccaaattgccgctcttggggttcacactgcttttgcactgtacctttcttcttttcaagctaatgatttggcatcctggcacatatttgtgttccatataaatacatgtaccttcaagtctctgctcacactcaattgcttttagaaaattattttttttttaaggagcacagtattaattcaagaaagcccttgctgctcttattgtcaccaaaatcatacattgttttgcatagaataccgccatttgtttatatttccccacagtttttgtttgggggagttttgttttgttctagccgcagctgaagtgattttgagtgtttgcagcatgatgttaattaaccaaatgctgcaacctgggattcaggaacacctgggctgactcaaaatgctcagaatcagtgtggaaatctttggaacagtggaagggaagactctgaggtgaaaaagatggtataaggaaaagttttgatttctacccattttctaggcagattaaaaacagagaaggaattgtcatgttcccaaggtacaatctattcttagcaacagagggttgtcctatgtactcatgggttaacctgcaggcgtcccagactatttgaatgaaggtaggtttgatgaatgtctgtttggttgatatttgaccttaatccccatttgttttggatacttggacttaatcattttggatacttgcaaaggctgctcaactattccgtcatagttggactcccctaacctttcacttattcctacttccctctggtcttcccaaaccagcagatcatattgtaaaaagaaccatatttgagaaggaaatgaagcatccttcttgttaatagctgagcacaggcctggtcaccccacagtgactccacacagaaggggttcactccggtgtatcacactgtagtggcctgtgcagtaggcctgtcccttctttcaccgaggtgtcagaagaatggaattttgcaaagcagcatcaatgacaccctaggctagccctgtgtccttcaggatgtttgacccctttccaggcttctgcccatcagggctccatatcaaactctgtgccttcaccttcttagcaatgaatgttcagataccgccaaacaaccctggaagttatggccccagttaagaattcttctaaatatagcatcagactcttatctactttggtgtcccagtgagacctagattaagtacagactttttcaaggagcaacaaaaaggctcagaaagaagaatctttctagttgattgaaggatatttttgaaattccttaaaatgttttctgattattacacatgataatgacctgggaagagttgccccattatcaactcaatgaaaagtttgcaggggagggagggatctagagagatagatggctcagaggttaggagtttgtacctctcatatggaggacctgagctcagttctcagcatcaatatcaggtggctcacaaccactggtcactctagtcccttgggaatccaacagaagtggcctcttcagtcacccacacttgtgtacctgtaaaccccttccacgtacacatgattaaagttaagattaattgttaaattttcacatggacaaaccagaatgtctgaatatttttcttatttaaaacaaatgtcagaatattttaaagcttccagagagttccagagagtatgagggtcagcgctttagtacagtctcttgtgagccttaacccacatgagaggcttgctacagcttctcagttactcatttcacacacactgctggtcattatcagactttggagggtgaatgacattggacctgcgatggatcttcatgttttgcatctctaagaagttctgaattggtgctgatgcggtgagaccagcaagcaggcttgagaagcccttggtgatcatgataccaactcttggcaaaggacgagtgatgcagttattctaaagtaaagccctgtctccaaactgacagatggcatgcattaggaaactgaagctcttcgctcccttttcagtcttctctgagtgtctttctccatgttgtctaacagctgcattagtggcactcttgactatcgtctgcctgcctggaaagtgttcagaaatgtttaaaattttcagttcatagctttttcattctttctgtctgtgtttgtcaaatctgattttgttcatcagcattaaagactttaggaaaaaaatttacttgtctcattgattagttgtccttatttggttccgaatcatcagtggggatttcttcagttttcatgtcagtataatattctgtaataaccttcttactaaaatggacttttagaggtaacttggaaatcccaacaatagttttttttttaaacaataaattaatgctgacagaaaatgttgatttgtccatctatttagcaggttttgtttgtttgtcatgtgctgttttgagtctgctgaggtatcgtgattcataattttaaagtcactggcacatagctgtcaggctttagaaaccaagactatggaggacattcctatttaaaatcatcatccagcctcaaaggaatggctaatgaatggctaactaatgagttaagttccaaaactacttagggtgcttttctgcaagatatccagagggttcagtttgacaagtggtctcaggccatctcatactggggtcagtagaagaagggctgtctgtctttatcacattcagatatttcaagtttgagtctccatgctgtagaagtactggccctcggactcggcacttacccttgacctcactgaggctccccttctcactgtgagcttgaaccccaaatgatatttacattcattccatctgctcctaactcaagcatcttgacttgctgtttgttgcctttcttggcactacactacagttgtggaaaaacacctaggatccctcaaaaaaagttttcgtgtcctaaacagaatctacgacgtgggtcaagttgcattacgtcctctgtctttgctggggcagggtaaatgagggagcctgtttccttccagagctgctcttctattcctgaggagctgtgtatgttgagggctgaaggcctgtgagagcacaagcattccatgcagcaggccttattcccatactcagggtctcacagggaaaacatgggctgaaagaaagacttagacaccagtagagaaggccacttgtcttttcctggttgtccttcagtggctgaataacagcactgggctgtggtttgtcttttcagtgaagtccttgaaagttgttcctcagagacaatttgaatatatgcagagatgaatgcatatgctggacttcaaaagatagctcttggcctaagttccaaatgaaatgaatagtctaactgtaagacagtatttcatcttacaacccccagaaagggccgggtattggtggcgctcgcctttaatcccagcactcgggaggcagaggcagacgagttccaggccagcctggtctccagagcgagtgccaggatagctcaaaagctacacagagacaccctgtctcaaaaaacaaaaacaaaaaaatccaaaacaaaaaaacaaaaacaaaaacaaaacataaacccctgaaaggaaagaatcaggtctgcttccagaatcttattgtctccttccttatttctccttgaggtttgtagaggatggatgattgctggtgtggtaggctggctagctacacccagtgtctcacaataataagggacatgggatggcttcccactcagttcttcagctgtgagaattaggctgccatggtgaccagggacaaagaaaagtaagtgatcacagtcatgatggagcccatttaatcaccttctttgagatgtcccttggcagggacatatgtgtgcagtgtttaatacacttaaaggcttaatttatacactaagaaatcaggactaaggaagctgtggaaatgtgaacttttaaaacgtaatggacaaaagcatatgggagaggcaagtggactactagactatgtctggtttacaaaatggatttttatcctgatcccagtgagggagagaggagttaaaagggcatgccctggattcttttctttctttctaatcagggctaaagcaacctatagagaccagggaaagcattttggagttcctgcttgatcccacagaagtgggtcctcctaactaactggctgttatttaagagctacaagttgggagtgctttggcttgtcgttctagagtggcctttgtcatctggatgacaatttttccaatttaattaacaatttattcagtcgtaaaactacagtgactcatgtaattagaggcttccttctgtgtcaacagaggctttttggagcttggtaacaagttggacaactctgctgcttttcaaaagaagtagtcaatcaccgggtaatatttttagaatttcagaactggaatatggctggccgctagtcatctggaaagaaaacgcttgattaattacaacgaatgtatccaagagggacaacattttcttgggcctcattgaagtttttgcaggtggccttctccaagcaggtgaacaggaagggaaagaggcacctctcctttttcattagtgtcccctcagaacaaacaaaaaactgagctcccagagctgaccaaggttatcttgcaaattctttgccccagtagagtgacttaaaaaaaaaaaaaacaaaaactgttgtgttgtttttatcttgctggattttgagtcctccttgagcatgggcagctgaaaggtatgtctaaaatattcttcaggaagacaccaaagtggagttccacaactgtcacaataatcactcattagatgagtgatgtgtttgcaaaatcagccacttgaacacttcgggagcatagacgaataagagaaatgttgcgggagatactgccaattaattaaatgaccacaagataaatctgaaatttgaaatggataattgcagaatataaatgagtttatggcaatgctgttacctgtttttctgttcacactataatgccgaggttatcagacgaagtaatgccttagcctctcccttcagggacaggatggttcaataggggactcaggcagctggggagtggcagagtgggtttagccattcccatgttaggagagataccccctccccccccaaaaaaaagaaaaacaaatcacattaagtcacaggggaaaacactgacaagggcactgtcttcactctggcttcctttctgccacagggaaggagctggattgagtaagaagatagtgcttccaaccccagccctccctgctggttttcatttctctggaggttacaagtcaggagtggggagggatctgaccttaaggatgggtcctctcaacaccagcatttttcttcctctatttccagcttggtcacccacagcttttttccacctcttgtcccaagaacaactaccaagaactatggtggtgatggtttgggaggttagagttcaaggaaaagattctcagagtagctccacccatcagatggccccacccctcagatagctccacccattaaatggctccacccaccagccatctatctagtctcatttcagcttaggttctccctttatctccagcacacacagtttcggagagcaaactgctttcttgtttgagtcccaaatcatctttggctattgatagaaactggaaccaatttggtctacgttttccactttttttcccagtaggaatcttgcttttgattcaagttgtcaatcatttctcaaaacccactctttatttataaatctgtttatttatagtcttcttgttctgcagaaattgaggtaaattaaaggaaatgtgaaatggtaaaaatacaagtaaaagcagaagacaaagattggagaagaaagataattagaagagggtaagacccgagagaagaggagacatttggtttctagttccttagctaggaagcaaagcaaaacaaaaacaacagaagcaaaatgtgaaccctagtcggtctctctggatttgtgttgatgaggtagcagaaacaaaccttcagacactaaaagaaaactctcacgtgggcctcttttcagatggtaattccttgtgaaaagcatataggtattgtggttgtaaagatgaccttgggtctttctacccagcagggaatcaggcaaattaatacttatagaacacaataaatgtagctcaaggacaagccttagcaggagagtgggggaaatagcattcattctgacagaggaaactgggctggcagcaggagggcagatccagcaggaaggtgtttatcttagtgagcctccagaaggggtaggattgggattagagaaccttcagagatgaaccttcaggaccaaggagtggaatgagcaatggccaaagctgtgtgcttgtatttggggtgagggagacatgcagtattttgggacacatatgtaggacaatgcaagacaagggggagtgtgaaagcgtggcttttgggaaactgaattgtgtctgaagaaggcctattgtctggcccaaatcttgggaaacacattctgatatgagtgaaggatacactacagaggcaagaggatggatgggagagatcagttagggcagtgttgtgataggaaaattaaaacagaaaggtgaccagagcccgtagactagaaaaagtagcaaaggagagtctctgtgtgccataattaaaataacctagccacctagccagattggaagtaactaagagaccaacaagagcttggagattcaaggaagttgttaaatatgcagggttggaacttctggagccctgtagtttgctaaagtattatacagcagtgaaggatgctaccattaggcatggctggtcatctcataatcactgaagttaatgttttctattgtgagatggtaataggactgggaagagtaactgagaatgtgactgactgtctggacagcttatgataagcagtttgagaagtcattttctggtttcaattttattggtatgtatatgtgtgtgagggttcctgcagaggtcataagggggaatcctatattctggagctggagttgcatgtggttatggctggaaacagaacatggggcctctggaagaacagtaagcactcaactgctgtgctctctcttcaggctttggaggtcatttctactcctggtgctcctgggccaggggaacgactactcctttctgtaattcattccattgtctcctctgcagtctgtggttctctgagaatatattcagaggttttatcaacagcagcaggtgaaattgagtacctctttgctggcactagagttcatgaaagaagccttttcaaagtcactgatgctttggccactgtcaccactaactcaagggaggacagtctaggagaccacatggcctgtaggttctgaagacaagattccatagcctgcagtgtgagggactttgctcttgacctactcagctagaagtgggcagactgtggttaagacccctaagcaaaactgagtagaaagaactggtcaggccagcctagtgtctcgcagctccccaaaatgtttcctggtgacttggaaatgtgacagcttgcaaaggcagcaggaaattgacaactgaaagaagacactgatgtggctctgagaatccccgaggacagataccaggaaggtagggaccctggagggtcagtgaattgttacaatattcctaattatcagctgatgtggactgggtgtttcattgggaaattctccttctaattaacatggttctcctctggacagctcacaggtctgtgctaattccagaaacagtagaaagatagaccaataactctgttttaattgaaaatacagtaattagtttgtgcagtcctgctcttaattacagtgccaaaattttctgtttctaagctattttctggtcatatgatgccctgacagaattaataaagggtttttttggggggtatgtgatatgttccaggtttttcaactctgtgactcatttcaaacctagacatggagacaggatgcacccattctgggctcctggatcctttgcctttcttcagcaggaatacagatgtgtctcttcttgtctcagaagcattttatgtctacgcaggagcatctccttgggtaacaatgagcagtgttcttgcttcattgtctcattttgtcttcctaatattattccccttcattgtttgacattttcaaacaccaaggggaattcctgccatgaaactgttttaaagcctacaattcagtagtatctagtcaacagctccgaggtgtccattatattcacatagtataaccggaagttccaaaagacccatcactcctaaggaaacccacgaagtaactcctgcttctttccacccctaagccccacacaaccactgctcagctttttgtcttcatgaatttgcttactttgaatattttatataaatatagtgagagctacacaactttttttggaaggggggattgtctttttttttttttttcacttagcatagttcctgaagttcacctgtggcagagaatatattgaacttttgattactttttatggatgaatagtatgtcatcaggtggtatgtgacattcctagagacacataaatgaaatgttcacttagtcccaaaaggttctgacagaccacagtaagagtccatcaatccagtttagcaaacaaataatcatgtttggtttatttaaagaaacatgagtgactcctggcaactagactggaaaaggcgcacttgcatgactgttttactcttagggaatttactataatgtgtagttgggggaaaggtcatgattagtatccagagaagggcctgttgatccttttcgttttaagtgggactgtcagtagcatctgtcaccacagactgaagaaaaagcttgtagattcaagatacccttatgtggtgtctccctacaacagacttcacagttttctgtacattctgttctgccatccccttgactgtggggcaagggctcacccatcactgtgcttcaaaatggggaggtcatgtcaacaccagataaatgtattgctataacacattttgatgactggctttctggttgcttccagtgttacctgttgtgtgtgaatggtgcttctgtgatcatatatggggtaaaagtacttgtgagtcacgtttctggttcatctggaaatgctgttttcactaattcccatggggacagctttattttgtattgctgcttgctgttttagtttcttcacatcctttttggagacagccattctggtgtgagtgaagtgaagtggtatctcactgtggaattacattttcttttcctttgcttttttttaatttcttttgagacagggtttctctgtgtaaccttggctatcctggaactaagtctgtagaccaggctcaaactcacagagatccacctgcctctgcctcccgagtgctgggattaaaggtgtgtgccaccactgcctggcagggattacatttcctaaagactgatggcaggggcatctttccaggcagtttcagggagagctgtattacatgactgctgtgtcagtgactgactagcttctgtagtggggtatttgaaaaacagacaacagaaaggactgatggggagacaagatctttcagaattttaagtgtgtgtgtgtgtgtgtgtgtgtgtgtgtgtgtgtgtgtgtgtgtgtgtgtgtaatagtgtgtgctctatgccacagtacatgtggcagttggaggaaacatgcaggattcagttctatccttctactttgtatgtatgtcccaggaaccttgggacatacacttttagtcagttgaaccatctcactggcctaatattggttgggatttataatccagagggcagttaactgtagagtttcagtgacttgatttttttcatgtgtcccatggatttcaaagacagtttagagatggagaggtaggtttcaataggttaaagatatttttttgggcaggaaattactaatttatgtcatgtttgggcactagaaatcattaaatctgtttcccttttctacaaaaagaatgtactttgattatattttaaaagtgtcccctttttaggtaggttctgcacaacatagcatacagaaaaagtcctgctgcctttgctcgttgttgtttacacaggggataagaaaagggagagagcgctttcagccaagactgcagtattccagtcatttgccaaaagacaagcacaaagggatggatgagagtcacctgatgtatgttctctagaccttttaggaaacatggagttgttcctgttgctatatacctgcaattctggaaggaaagtggtattgtagacatcaagggaatgggtactattctgaaaggaatgccccatgtatgttaccatggcaaagctggaagagtctagagtatcactcagcatgctgttagcagtgttataaacaagcaagttgaaggtaagattcttgccaagagaattactctgtggattgagcgtattaagcatgctaagagctgagtcgttcctgaaataggtgaaggaaaatgatcaggagagaaggaagccaaagaggagggaacctgggttcaactgaagtgcagcctgcccctgccagagaagcacacttcatgagaactgacagaagggcacctgagctgctagtgcccaattcctgtgagttcatagcttaatagatgcataaaaagaaataaaagaccaagtcttgggggcggtcagagagaaaggcaaaaagtcttggctgtgtctgacaccagtgcctccattactggcagtgcccctatttatgtgatactcaactgttcctctgattgaactcatccatatcgttatcctgttttttgagtatagacacattattaaaatgttattaaaataggtgttggtgttgggattgcagagagaagctggcaggatctggacatgacgggtgtgtatatatgttcttttgtgacccgggtcacacatgtgtgcctctttgagagtattcattgagttttatgctcagtgtttatactattttctgtagatacgctatcctttggtaaatatcttattgaaaaaggaaagataatgtgctttgtccacagtgccttatatggtcttagttttaatataaaggctgcttgatatgagaagatgtgtgtcttttggtcttgataggttgagaaggcagacagggaactgattttcaattgaacatctttgaaggaaattgtataaatgcatgattgctttgttctttgtggcagtcctgtgtaatgatgtgctaccttcatcttgctgatagagaaactgaggctaaataatctaaaatcttaaggcttgcatcaccaggaaaaaaatataaatacttaaggttcatatcaccaaggtgtaatggagtcagaaatgcccctccagagtcctctgtggtactgggtgctcatgttagccagctgatattcaagggctatttgttaaatggtgcatgagttcattaaaggagtcagagagccttgctgctgctccggcagctctgggttgtgctggttttgtctggcatgtgtttgcagatgtgggtattgaagcagaggtgacaggaccctcatccactgggtttccccttcctagatgctctgagctggccttcagttggacaaggctgggggatcttaagagctcctgacagattgacgggctgttagccggagtgtgcctctccttcgaggttcagcaaggctgttctcatttagagctggtgtctgaatgcctccttggctgaaaactggcaggaataatggtctggtttggaggctgggttgcacaggattctagtgagctgtcaaatgtgattgccgaaatgatttcagtatgagcttatcagactgctgaggagcggagaacaagcacactgcatgctatttatggcattcacacccctgcagcttggaacaaaatatagcacgtcccaggctcagatttaaattagaatattctggtgtgtatgcacagattaactgaacaatagattcaagggacaagaagatcctcagacctggatgagagcatgaatatgtctaattttacagtgcattttgaaaacgtttcaatccccaaaggaactgattgtcctttaccaaggaggcctgtgaagggcgtcctagtgcatccaattgcaaagtctcagtaaaactcctgccaccgctggattgcactgcagttgagtatgtgtgtgtaagtgtgtgtgtgtgtgtgtgtgtgtgtgtgtccgtatctgtgtccatgtccatgtgcatctgtgtccttgtgagtgctctaatcttggaaacctacggagctcatcttcagacaaacctgggtttgaatctcttcccggctgtatagcattcagtctgtctttcatgaaagagtaaaaagtacctagaggtgtgtgaggattaagtgaggtgatgttcatagtgccattcctgtcatccacctccttttcttctggtaacttgtccaggaggaaaaataatctacattggtaaagtgctataacattgaatttgaaaacaaatctacatgggtaaagtgctgtgacaccatctttgaaaacagtctcttctctgattttctttagatagtataataacttcgccattataaataggcttggggtctggggaggtggcttagtggttaaaacatttgcagtgcaaacgagaggactggagctcaggttccctagaaagacacaaatgccttctgtgtgtggcaggtcacctgtaatttctgcctcagaaggctgagacaggttctccagcaggaaatcaagcaatatcagtgtgctgggaaatactttgcctccaagataggtagaagatcagtggggaggattcccgaaaatcgactttgggcttctacaatcacacaggtgcacctgaacacagacacgtgtatctccacactcgtgaacattgaacacacacacacacacacacacacacacacacacacacacacacgcggcaaaataacaaaaatggctaataagtgtcataagatttaaaaatagatggtaaaataactactagttggatgtttctaggctttgaagtgtattattcacctcaaaacaactcactttaattgaaacaccttatatacttaatttttaaaaatttcatttataggtacttatttttacataagataaatcaatttctcctttttggtccatctcatttttttgttttttgtttttggcaaatgtaagatactaaaggaatgtagagcatatagttgttttaattcttttatttccttcagggtggggtctctcagtagctagggatatagcccagtagtggaatatttgtgtgatgagggcccaagttgttttccagtactgtaaaaccaaaccaaaccaaaaacttcgatagactcttttcctatattaaaagttttcaattatgagtaactcataattacatctttttagctaaatatatcgactgaagtattaaagtattataagcacattctgatatctgtagactttgactgcccacctatccattcatacgctcatctgttctttcagtaaatatgtgctgagcctggcctgtctgtcgttcttctgagtgcttggggcccagtgatgaaggatacaggtgctagagggcagagggatggatactaggagaacctggcagccaactttactttgatatgttaaataggcacctcagctgtttgtcctgggtttgaaacttaatagctactacctgggggtggaaacaggacatagataaacatttaggaatcaccagatgacatttattgtatctgtgctaaatggaaaagtaatctaatcaggggaagactttaatagctgagtcaagctgcaaagggagactatacatgaagcaaatcttgcccataaagtcaaatcctagcttccattcttgcaggcttgaagtctggtggcaatctgggggtggtggtaggaatcctcctacatgttctctgtattcagggggtatcctgtcagtgatagactctgagttccccactagctcagctttgtggaaagtgggaggaacaagacacaggagtttcctgggcattatttattttgtcctaattagatagacgccttggccaggtggtgcagcacttgctgtgtcttctacctttgctgtgcaggaagctaatgcagctgagtcaagaagcgtgttcctacaggcatgcagagggggtaggggggagaagaaaagaaagttaattaattctatccacacagtcattatcatgaccttcattttgattcttgatgtgatgacagccatatttgcagcttgtacagccgtgatactaattagaatggaaacagcactttggataaatttcctttttgagaaggtttatttaattcactttacagtctcagtctgaacacctggagacaggctggggctttcacaggcggaggatttgactggatcatggagaacggcacccaccatcatcacttcggggaaaattaaccttcactgagtaagcagtgctgtacagtgatgcttctcaaacccgctgcagaagaggcccagttactttccttttaatattttaacccactgcaaacgaaacacaatcttctctacaggactgagaatggtgtgtgtgtgtgtgtgtgtgtgtgtgtgtgtgtgtgtgtgtgtgtgtgtgtgtgtgaacaccgactctagtctgtacctggttcaggggttgagtctcccagtagcaggggtatggaagcatggtgctccagcttttgcttcgaagaagctttcctcttcaagcttctatttcattctgggttctgctcttaccccagggagcatcagttacaggcatctttgggaaccagtgctgtcagttttgatgctaatggccctgtctccctggagctgtggacatagcctctgacctccttggggacaatgtttttaccttctttactctgatgactgtcttacagaaataggaacttacaagttcctttggcttttagtggcagccctctgctctcaggggccccacccatgtgactttacatttctgtaataaaatgggtattaagtctaagacttacttgtgtggtttttgtttgtttgtttgttttcttttttcttgttttgtttttctccaagtctcaatttttagggcaatttttgtatgattagagacaaaaatcaaagaactccttggtgacatttttttaaggctccattgggccactaacagatcactctcaattctaaacccagaatttctttggtaagcaaagaaaaagaggagaatagaatttttttgagagaaagtttcctgaacacttgtactgtggttaacactgtcttggttactaatagtactttagatggaatttatttttgactgccagggacttagaatctgaaataaataatatggaaaccccatactctgtacagtgatacaaaagattggccattcaacaaattatttcaaatatcttttaaataaagattttctaggaaagttgaacatagaaatagttttcaaggcccacacaattaatttttaacttactaatatctgtatataataggttatactttttatatttttggttgtgagcctagactttaatggctgagccatctctccagcccaggttatactttttaaggagcaaattcatacatttcacagctgtgtccactcatgagctcattgccacaagcaataacagaaaatatattcattgcttccaaaagtttccttccttctttgtgatacattcttgtctcagtccctggtgccaggaatccatcatcctgtcaattactttgcattttttagaatttcaggtaaatggcatcttacagtatagactgggtatgtaggatatccttaccttgagactcagaatctggcatctgtgtccatagtccattcattggtgtgactgagtgcttccttctgtggaacttgtttctgttttttgctaagactccagttcaagtgttggactactgtgaacatgtgtgtaagtctcagcatggacagctgttctcctgggcaataccaaggaaggagatgacaaggtcacctggaaggtgtctgtttcacaatgaaggaatctggacagggcagttttgctgacatcaggcattaatgcatacacattggaaaggtttgttctctctctctctctctctctctctctctctctctctctctctctctctctctcttatgaatggaccccaggtacgagtgtgcctgtgtgtgtgtaggggtagtggtggtgaagattctccctgaatgattgctgaaaatgtgtttttataaaatgtagtccctggccacgcagtgctggcacacgccattaatcccagtactctgtgagttcaatgccagcctagtctacagagcaagttttaggacaggctccaaagccacacaaagaaaccctgtcttgaacaaccaaccaaccgtagtctcagaatagggaaatccaagataggagtaatagagtgtaaatccaagtgaaggacctgggaccttggctccgctgtttcctaaggagatgatgtggactggttcttcagtaattttatctgctcttttgtgagtgggcatgttggtagtgaggtgatttttttttttttttaggctggatgagagaattaaataagaaattaagaattaaataaaatggtattagtataatgcctgggcattgatgacaatctttggatgtcaaattgttgccatcttcattgtatatagagaggtgtcaatgtttttctttatttattaagtgtctctctctctctctctctctctctctctctctctctgtctctctctctgtgtgtgtgtgtgtgtgtgtgtgtgtgtacatgtgcatgaatgtacactgtaggctgaagttcagaagacagcttatgtgaattagtcttctcttttcaccatgtgggctctgggaattgaactcaggttttcaggcttgctcctaagggctccacccactgaatggtcctgatgttggtcctagggaggcattttaatgaaactgtatgagattgaggataagctgccttgaagaaaagtgaacctggtctgccattcatcatcttttccttggtttccaaattttggcaaaggaatataccaaagtcattgctttgagagcttccagttttaggcgcacagtgttccagataaaatgaaaactctgaattgtttgtgaactacccaggtgaagctaggctgcttagcttttgggggggggcgttggagtgttggattagtaagcttggcaaatgctttagcagagtaattctaacaaaaacctagactcttcttagagctctttcaaggacactgtctgggcccttgggactattgttagaactattgttagtgtggtaatgacctcattttgctaagtgcaatgctgtattgtatttattctcttaattgaaaacaagattctaccagtgttgaactgtgaatcggaaattcaactggggataatagatacttgcatttttaaatcacaaaaagacaatgggaagtaaacccaaagctgaccatctccatgaatcatgtggatatgcataggatgctgtcctgtttttacttgatagtggtgacattaactcactaaaatgagatttagtgagataagtttgacaaggttaagttttacaatgggcagtgagaaatttcttactcagttggaccaaaaccatgcgtaaaatgttgtaaatcattaaagctggtgtaaatgagcacactgggtttgcgctttgaacacctccccacttcttcatctttaagtagcatgggatagcatgcatgtgcccaaacagcctagcatgtgtgtcatgcaatgtgtttacagtaaagggcttagatgacagtcttgagacacatctccttccaaggtctagacgttatgttcccattgtactcaagcaagtccagcctgcctcagctcgaatgcccttcaatctgcaagtcccactactttctgccacacagacatcttggtgctgctctattttgggcactttgagcaggtggaatttgatttgtggtgttactgtggttgtgatcaggagctgcatgaccgctatcatttgcttagatcagggaggcagcaagagagaatctgaaatagaacccaccatgtgtgcgcctgctaattatttgctttgttctcacagctcggcactaattcatataatatcagacatttataatctggcactatgtaaatgactagggagaagtctaaaaagtgtctcatagctggatgctcaggctcattgcaaaaagttattaaattctcaagactgaagctaattcggaagtggttggcagaatccatgttgctaagtatttggtttgggactcttagactacataaaaccagcctgattggtttcaaagatggaaaatacagttccaatggatttttaaaaatatatctatttctaatactaaataaaaggattggtgaatttttcacaaattgaccagatagaatgccagaataaacacagtgacattctctgtttaaaaaggactttgacaactctgattcttgggaggagctgttgtgtgactaacattggccacagaggccacacctgcccacagcacactgctgcccctcatgctcacactggctgttctgtatcttgaccgatattgtctagagatggccctctcacctccttcaaggtttggctcagatgtgaccttctctaggggcattattctactgcctcattaaaattgcaacctggaccttccctggcttccacagagccaaccccctttgtttttagcttcatttctctaacaccatccccagtgtgcttgagatttacttcttaatagcatcccccattactgtcagttttccctggcattcctccccactcctctctgcagggagggctctttgtggtattgtctgctgttgggctcaggcagtacatagtaggcacttagtaaatacttgatgagtttcctggatgtgataaccatttaaaataacattcccattgagtgacagagctgtcagctagtaaaggagtatgatgtcatcaaagagcgcttcccttgaggtctgccctttcttccatatacctttgatatctgtgagatcactctttgttttctaacaaccccttgggaagattataagggacgaataagtcacaaataccaaggcacagtttgcactttgtaaccctgccctatacaaacacccatgctttgttagagagttttagtgtcccacaggatcaacagtatttttattctcacagtgtttggactcagtccttctatcagcttcctgctagatgacactgcttggtgctttgctcatttcccctcctggctctttcctaccccttcatgaggtaactgctgttagctcattctggaacaggcattggagatgaagaggcgggcatacactggacctccagctgaaatgaacttcagcctgtcttgttcaaagataattcatgcttcttcgtatgagggagaatacagaagtgttctctgtagtcagagaaaactggtctcattaatgtctccacttgtatctattccttctgtcacagtcaatacccaggatcatgggtcatagcctctggggcagttcttctgcaggtatatgtacttgcttcccagggggcagggctcactgtcacagctgccaaaaagggacccatagatcttagagtttaggttgaaggcagtttgagagctactgtactttctattgtaatactagtctccacttctctccccacagtcttcttctctgaacccaccatccccagtcaaagtctccaatacagctgtatttggtgtgtttaaggggcttggaaagctggaatgataaaagtgcatcccaagtgttcctctggtttacagagaacatttattaagagcagagactcagctcccttccttcctcagtgacttctttttcagctgtgggtcctggggtcaggtctgtgcagacctccagggcttccagagcctgctctgtgtcatccaaccaagaggctgatggagtagagcattagactttatccctaaggcacttagttgtgcattatgtatccagtctcttcctgtcaagatgtgagaaaggccacttgacaagcagccaagtttattttaattttcttacctttcctaccctctcttccttgatgcacttggacatatctgttactgtacagacactgtattggtgtctccatcagtccaggcatttgagtctctgtttatgtggatttgcacggtggtgagatatagttgtgttagcagtccgttcctgagggctggggctgagctgggggaaataggtttgccccaatggttgctggaaaggggcaagttagtaaggtattgctttcatgcaacatggtcataaaatgtgtctccatagtcttccagccaagttctgattgcatagggaggggatcacccttgacacctattggcttctactggatcccttctagtggaatgtcattgcccatctttaaaatgccaggatgtcatcatagggagcttgtattctgaggagggcttcttcctctgcactgtcttctcctgtgacttttttctggcaccatattcttcatcctgagggtcctatctttgctgtgacacttcgcctcctgggaatcccacaaacttcaggtctgtacatctcagtcctagctacctgtcacaggctctctgatcatctctactctgggaacactctgagatcactctgtgcaaaggaaagtctcttctagatgactgtcctatcccttgtgtgccatttatatatagccttgtatggagtgtgtgtgtgtgtgtgtgtgtgtgtgtgtgtgtgtgtgtgtgtgtgtgtgtgtgtgtatttgcatccccaaaaatcagtcactaccttcttgaacacagggaagttttactgtctctttaattttcacagctgtttgttgtagatggatatggtgcctggactctccttgcagcagagtcaagatgggtcaaggaatggttaagcagttatttcagctgcttctagaactaagcagaatcttcccttgtctttctgaggaattgctagcccctatccagagacatgcacaaagcctgcccctaataagaactcaccttggcaagtatctgggtgcgggggtagggggagacctagaacatctaagtggtttctggaagagaaaggggtttcagagaagaataaaggccaaattgcatccttccagaatcacacaggaccagatgacaggcacgtgatagcaaattgaatagctgttcttcaacattgaaagcatcttgcggcgtgattgtttgacttgtggatcggatgtcagaaagtctctcgggctgcaatgcccaagagtgagatgtcagcagttgcctgtgttgtttaagtgtgtgttcactttagttatcatctgatcagatgccagctggtaatgggatttagtggctttgcacaacaatggagcccacagagggctgagaaaatatgacagaaacagtgagtggcagatccttagatgtctcacttaatgttgtatgactgagtgcagcatgtagagcagttcttcatgtcaacgtcagagagagcccatgtggtaaggcctcccagtaccctgtgggtaagatggggtggctgggcaaagtcatctactgcaaataggctcagaaatctctaggcagaggaactgtatgactttggcattggggaacctcaggcacttcacttaggattttccgattccaacctgatgtaatacattgaaccctttgttctgttttttgaatatataattcttatttactcagtgtgaagtgaaaacagaaagtagaagaatatccctggccaaaggccctgctgcagaaagaaagcacagcagcctggccaggatctagttttcagaaataataggaatttcattcgtggttgactctgtaggctaaggcttcagatatgcaaggtgttctatacaaaagcagtgctaatggcccctgactttgtgagtgcaggtgtttgaagttagatagacatttgcttcactcggtttactttgaatgtattgaacttgaagtggcaaatatgacccgtctttgggttaacattcagtgccttaactagagaagaaatactgtattcagcaaggctacaactaaaccatgttctccaggtagtacctctgaatttggcaggcatgtgttgtcaggatagggtgtatcagctgtgtatcattggttttgtgattcctgtttctcagggtcagtctggttatgcatttcatggtggaaaatagctgtactagtctttgaacaacttcatagacaggaaagacaacttgaattacatgtgtgtgaaattaaagcaagtctcttcagatttataacaggtgaaatattgcagacagactttcataatattttaatgtagacatggatacttctatggatattctacatgagcatttccatttaaaaaggtgattaatgctttatggttaatatttcattaatataacttgagaggacagtgatgtatgataaaaaattgaagtggaggtcagaaactttatctggtatattcttaacttctgttttctccatgaaaatctcatttcatcacagatctgtatacagccttctgttgtcagctagctaaattatcttttagatttcctttcaaatgccactttctctgagacactttaccagatttctgtttcagaatcagatccttatcacatgcattaattggacattgtgttttcctctgtggctttcaccctactgccaactaaataattgacataagcagagctttgttatcacccaactctatgacactagatgtttcctagagtagaatttcagattctctgtggttgtttgttgagggaatagatgagcatatgagtaaatagttgaactgctcatgtactctaggattcagaacactatgctgagctgccactaactatcttggtcttggggtgcatatctttactttaatggcaagcagactagattgtttctatgtctgtgctgcaaagctgctgtaagtagaagaccacaaacctagccacttaacaccatccaaagggctatgccaactctggtaactctgagaaaataatacttcctagcctcttcctggttgctgtaggttctgtcagtcctttccatatagtgacatggctccaattagttctttttccatagccatctttcttttgcatgtgtagagccagaagttcatatttagagacagccctaatacagtatgacatcatcttagcagatgacattatatttgaagaggatgagatccatgttccaaatcagatctcaggctgagatctcaggcaaacatggatttgtgagaatcccatgtaacagaatgcagttcagttctctgatgctgccttatgtagttctcttcttgagattcatagccccattcttcacatataggccttagaaacttaggttctagcaacacaaaaactaggagtttacacccagctgcccacaggcatatatcaaagcttgccaccttagaggagatgttgcatcaaaatccatgtctagttctaattttctggactcccatgatgtctttcctccaccctgtctgcttcccattgcccttggctttctaaggattccgatgagtccataaaatttctttgcatataaaagtaaagggcactcccatgtctgggatttcagcttccaccaccttatcactggacatgtgttgagttcagtcttcccacatatgtgtttgagtcactggcctctgcatctcctgaggagtgattcctggacttctgtcctctacctggtccctttctgtcattgagtcagccagatttgcctcttcatccaacttaactaatgatgcaacccattaatacagttcctcatctgtggtgttgcccaccaatattttattttgttactatttcataaccaattttgctattgttatggattgtaatgtaagtatgtgatatccagggtatctgatatgtgaaagggtcattcagtccccaaaggggtcataactcacaggctgagagaactttagagtatttatggatctcagactcttttattttatttgtaccaaaagattaagtgtacactagaaacagcaagaaaatgtggcctaagactttatgtgcagaaagtaaacttgaagcagtagctctcgagcatgtctttgttctgaactattctgcagagaagccaaaggaacatttgctgaagtcctgttacatgccaggccccaagtgtaggctataaatgtgtgcacatgtacacagattagttgcattaacatatttaaacattgcagtcccgtagaaagaagcagtttctccaagggcagaaatttgattagattacaagaatggatgctttgcttcttgttatcacatattttgtatattgggaatagaaagtcacaacaaccttcaaagagaaaatatacaaggaggaaatggaggtgcttacaggagttattttaaagttcgtcatctattttaaacctaatcaatgcaagctgaagtttcctctcctctgatgtaaagagggatagagaggttggagctcccggaccaccagatgatacagtcagttcacagatgtcagcacactgtggaacaacctgttagcagatgaagatcccaacagcacagcttttactctatgcttatactagaaacagggacatgtggagagttaacatgtggccacaactggtcgaagacaaagcccaggtgagatggtagccaggtatgcaaggtcccaccttcctgacagctacaggcctgtggggaatttcagtaatacataagggagtagatatattattcttgccagattagcaaaaatacacatctcatagtctttaagtaattacacttatacttaagtaaaagcatcatggatctatatatgtatggtcttttaaagaattgtcaggtgccagttaggaatgaccactgatatctggtttacatgtcattttgtgccgtcaatatagtaaaagaataaatgcaaagtcaccagaaagagtttattttgtctacatgtctaagttccacattgtgtttctaaaacatacattgtgtacttccattttcattgctccatttcctttttttttttttttaatccagtgatctgtttatttctgaactccccacagcattaggctttttggtgactgctgcaaataggccagtgtgaaaacacttcctgtatgtaaggttctccaatgcctaatgagtaggtccaaagtgggaacaggacggtggctgagccccttaagaaactgtttcggatggcacatagaaaagttagaaggggtttccttacatacttttacatttttcccattccctgcacaatgtttcacaggaaggctttccacaaatggaagaaattcaaaacaaaacaaaacaaaaatcagcgcctctagttcttccttccctctcgtcacctttctgctgccaaaagtaatgatttttaatgagaattctcagccatagaaatctgacttttgaaagcaatgctggagagtccttcctcttggcaggtatgtcaaaacaaacaaaagttagaaagagataagcccattttcccacaaatatccagagcttcataaaagtcatagcaaatgaaaatgaaacatgggagcaaggtattcaccccacctaaacctgactgactggagaaaaaaaccatttattaaaagcaattaagaaataaacaccactggggaatgatttctccctaaactgtaggatcagtgggtctagaagggtctagattcaccgtcagcctggatgctggggctcagggtctctccatggttgggcatctttgtgtctagacattttctgaatgggttgcttctttgtctgtgtgtcagctagggtactgtgcattgcacgacacaacatccatttccaaagaccttgttcataggacccaaaacatctgtatgtcttctggatgacattttattcactaagctagaaccacacacttatttttgccttctgaactttgtggtaattttcatttgtcatggatctttgagcacctagggggcagagacttggcccttactggcttttttcttttcccaagacttgaccaaatactcccgaataacagaccctctgtcatcaaacatcagcagtagcctgctcccctctctggggtcaagaaatattttctttacacctgtggcatagcacttcatgtgtataacacacacacacacacacacacacacacacacacacacacacacacacacacacacacacacacactacctaccttgctcttataatgtaagatttacaatggagcttttcaaagattcaaaattctctgggtgtaggggaaaatgcaaccaagagtgaactgacttagacacccttcttccttccataagcttacttactggagactacatacctgctttacaactctttggactcatatgctccaccttgtaaatatgaactagtatatgactgctctcagaaacaggtactaatggtagtattttagttgtttcatcatataatgtgttcttaattcagaatttgatctggaaaacaggagccaccgcaggaatttgaaacatgaaagaatttgatatcacatcttttataataattgtagtaaggataagagaaaattgtgtctggctttctgaaggatgctgtgaaaagcaaaggacttaataatctatggcctcaaccaacttatatcaccagagcaaatgacctgccaaggaaagtctggaatctgagcaagttcatatgtatgtttttcacaggacctgtctgccattactggagagaaaccattgcttttccttctcttccactttccacatgatgccctgattcttcttggtgctagattagcctgggattagctaataaagggtctggggaatggaatgttcttgggtttctcggcggaagaaaaatgcttatggtggacagataccacttggagtatgtggaggcttgaatgagaatggccctaatatactcatatgtttcaatgcttgctccccagttagtggaactgtttggcattagaattagtaagtgtgggcttgttggagcaggtatagcttgttagagtaggtgtgtcactggggtgtgctttgaggtttcaaaaccccatgccaggcccagtgtctgtctctcaatgtctctgctcccacactctgcatcatgatgataatggattcaccatctgaaactgtaaacaaacccccaattaaatgctttcttttataagttgtcttggtcatggtgtttcatcacagcaatagaagaataactaagactgttggcatgtaagaacacaactacaacggcagcagctttgtaaggtggcttatgttctcccatttcttactcacactaaattacaaagattgaatgttgaccaaacttaacacacctaagttgcagttgtaacctttcaaagctattgggtgtagaaggggattcttgacttctttggctttcagtatctgaagacctcctttgttttccttatgacagtggcaagtgtgaccaaaatcctctttgtcccccttgcaagggactgattcttcatttgcagtgaatccaggtagacctagctagggtcgagaggtggtaggctccttttgagcctgagactgccagatccctaaatgttcaacccacttctctggtggcgcctggcatgttttccagacgcaacactttgcctcttgtttcttcttcttgctctgtctggaactactattcatttgccaaatgtaatgcagacccatggggaacattagaacactttggctccagctgtgatcccaccaacctggccagcaggagtgaatggctgccccttgcccaccaaccccagcatgtagctggtaccatctctgctctgccaaaaaggttcttcagaggctgcagtttcagggcatgggccatggactgcaccttgctggccagtgggggcactgcccatcatgctgagtggcagctggtgcctgtcacacatgtcccagtggcatttttgttggaagagaggagtgatcagtgccagctggcttctcagctgccacgataaacaatgagcatgaaccaccttgtgtctgcggcacagctgaggggctgtctttgcacacgggctgtgcgagggaggtgggcagcctcctcgtgctccgtatgagcaatttccattctgttgttttctctcacacatggtgttctggaacagctctggaaggaaagaaaaagagagaaactgactcagtgttttttgctttagattctatgggattcatctttagatgtgtccattttcttgtgtgcaagaaggaaaataaacatcagagtgttaatggatgagtggcatttatggcttgggtacaggaatgtgtgttacttacccgtggaaaactttaatgctgcagtggacagaaccctaggcttttgagttagaaacctgaattctagctctgattctttgggattgatggcatgaatatatgtgttagctgcttatctcctcaatgtgaccaaatacctgacaaaacgcaaatcagagatggaaatgtttgttttgctttacagcttaagatgggatacagtcgtcatgacagaaaaacacagtggcaggaatgtgaatgtattgtgtccccagtcccaacatagagagcagataggaagtgaggctgggctatatgacctcacacttggcccagaatgacgtattttcttcaacaagacttcacatccctaagtattccatctgggaaccaagttttccaacacttgaactgtgggaggtctgttacatacaagccatgatactatggtgtagttagtcacctcacttctgcctttgtctaaagtgtaaacctttgttttatatggtagttcctcctgctgttgtatgataaaatgttcctgaccaaagcaacttaagtgagaaagggtctattctgtctcacagttgaagggtacagtcatcacagtggggtagtcagagtgacagggatttgaaggaactgaaaaccaggaatgtatgcccagcttattttctgtattttaacatcaatgatcttcacccagatgatgaccctgtccatatctaatcaagataagccttcacaggcaagttcagaggtccatcttcttggctattctagatttggtcaagtcggcatttgtaaccaccactgtgtgttgtcacccctaaactttatttcagcttttaatgactctggatttaggttacaattcatagacttagactgctattaaatgtctccagacccccagcatacactccttctcatcctagcatctctataagcagacatatggatcatgtcatcttggggtttctctcagactaaataggtaggagagaatcctctgagtgtcacttgcttgctgtggcattgccctagtgttaaaagttatcaatctaagggtaaggtattgagctgtgcagaattctcctagctatgcctatcttccttaggggtcttgggagggactactattgaacaaacactgggggcattttgaacagacagctttgtgctctctttgctgggtgagggcaggccagatactggatactgcattaggatctgtgttcatccagggacttaactcgctgttagtcgtgttccatccttcatgttgaacctttggaaataaccctcagtgacctcattccctcccctttgagtcatagatcaagtagaccaaaccctctcagctacccctgcctcttttttattttatagtcaccaagccttccaaggactacagttatatctgggaaatgagaatttaagaactgtggcacatgcctttctttggatgaaggtttagaagaaggaatggataagcagcctgatatgcacagatacacaccaacagaaagttcacttctggtctttggggctcttgttttgtggaaggctggattgatacccaagggcacagagaaggaagcagtaccttaagaatgtctatgcttgctctgtcctggtctcattctgtgactgtgataaaataccctgagcaaaatgctacttagggcagctatagtccatgatggtgaggtcatcaaggcaggaacttaagcagttagtcacatcatgtagtcagaagcagcaataaaggaatggacccacatggcctgcttgcttctgctcagctatctttcttcactttcatactgtttaggtcctagcccatgaaatgtgccatccacactcaggctggctctaacaaccccatctaacaacctctcacagacactcacaggccatcctgagctacataatcccccatccatctttctttccaggtgaactgagactgtggaaagttgacattcaaaactacatcacagctattaaaacctattaactccaaagcaagagtacacatgcttcctgattcatgtgctctgtgtatacattccttcataattatagaagtgcactatcttttatgtagttctgatatggttatgtgtgccttgttgccagacaaggagttgtgtaggacattgatttttttatagtatctggaatattcttccactgtatgtgcattcctttagttttttttttttttgactaccttgtggatacgtaacacacttacttaattgccctcttagcagagtctagcttttactgttagaaaaaattgggaagacaatgtacagagggaagatgtagttaacactgaggtaaggaaaaggcccctgaaccaggaagatgtccaggaacagagagaatcttagactttgcttttattagtctagtgcagggactgagggatctggggtcagactatcaaaagaggtttgggcgttattatggtgaaatcataaagaagacagctgggactttttgttcactctaattctgcccctctcttttaggagcccctcaacaggtagggctgaaacacttgttgtagcttgtagtgaatttgcatatacacttgaattttggggcctttctcctggttgtcttttactctggaagatgagttgacctcatgatcttaagagtttttcatagaaacattaacccctgagtcacaggagtgccagatcatcattattacatcattatttgattttgttcaacaaaagagtggttgtctgagaaccactcggccttggttctgactgctgtcctctggaaatctcagtccaaataaacttcatgaaacatttgctacctcatcacagtactttgggtgcgtttctgataggactgttgtccttctcctcttaccttcagcttgtatcattcctaataacttatcaacatttacttggaaatgttaggttttatggaaaaaacatgatcgatcattctagaaacagtgtggcagagtgttagatcttagctttctcccttgcctactgttctagttagcttttttggtatgataagacattctgaccaaaagcaaattggggtaggaagcatttatttggcttatctttatagaccacagtctgccatccaaaaaatccagagcaggaactcaagcaggaggcagtaactcaagcagacactacttactagcatgctttccatggcttgctctgctacctttcctacatgacccagcactacctgcttaggagtggttcttcctacactaggctgggctcttcctggataaccaatcaagaggaagccttacaggcatactcactggcttggtatgacagaggtacttcctcagtcgaggcttccctctttctgcataacttcagtttgtatcaagttgacaaaaatgaactaaataaacttggataagaaccatgtaacttaatactttcatctctatcatggagatgatgatacatagttcctcagattgggtggatacataatgcacataaaggactaggtgttgggtggttgtactggttgggttttgtgagctcgacacaaatctagacatattttggaagagggaaccttcattgtaaaaatgcttcaatgagattggaccgtgggcagttctgtgtgctggtgttttgattgatgtggaagggcccagttctccctgtgtgggtggcatccttcagcctgtgtggtgtcctgaattgtgtgtgtgtgtgtgtgtgtgtgtgtgtgtgtgtgtgtgtgtgtgtgtgtgtgtgtgtgtgtgtgtgtctgaacaagcagccaggagcaacagtgttgttccatgttctctgcttcagtcctacattgagttctgtcctgtcttgcctcagggatagagtgtgacctgagagttctctgctgaaataaacccttttccctaagttgcttttggtcatagggttttgtctcagtagtagaaaccctaattaggacagaggtcaaggaacacaactgtctcctcctttcacttatcctcaagccaccataggccatcagatgtccctcacctcagtgatatctccaaagcatcttccgagcaaggaatcaaataatgacgcatttttatcatctggcctccagttaaattatattctcattggctggtttacccactttgctttattttcaaaaattccatatggatggctaaatgggatccagaaacaaggcatattttttcctgacacatatgactaactaaagttaaaccggtatgcagaataatgcctaaaataagtgtttgtgctatttacctgtcaggcaaggaatatgaaagaaagaacttacagcagagtgcccaacactctccacccaggcaagaaaacatgcattctcctggattattttggcagcttttgtggaaagtccactgaaaacagaaggagacattggctcccctgtgttctttccaccataggtagctacacactgaagaatgggacaagcaggtggagagatcctatttgtcccatgtgggcctgcagaggatgtgatagccttctgcaaacacacaggacgttattctttatctggtctcctatttctactcttcttgaagggctgaagaatataataacactaggttcatttgtcaaattgataacagaaaaggaagaaaaagcccaagaatcccattgtagatagatgtctctcctggacaagctactgttactgacatagttaaatctctgatgaagatactttgttttatatggatagaacttcccaagttcaccctgcctttgttggacatctattactttcagattgataattcattgattggtaatgatgatgcagcccattggtgtacagtccttaatcctctctgtcggaggtcctttatgggtgtatctgttttcactctttcaaattgtatgaagttggtaatattcttgtagaccaggcaagtcacagagatccacctgcctctgcctcctgagtgctgggattaaaagcatgtgccaccaccatctggctgaagttagtaatatttttaactctactttataggtgagaaaacaaaagcacagatgtccaagaagccctaagtgatgaaatgtgatagaaatgggattgggactccagaatttagctcatgagaccatactcactgagccattctgcctcctattagccttttgtggtgtgtgtgtgtgtgtgtgtgtgcgcgcgcgcgcgcacatgcacttaagcattttctatacatatatgtatatgtatgcatgagtgaatgaatggcagaatattcttttgtttctttgttttttacttttatggttatgagtgtttgactgcatgtatgtatgtgtcccacgtgtgtgcctggtgtgcatggaggtcagaagagggcattagatcctctggagttatagagggttgtgagctaccacatgtgtgatggaaaacacacctaggtcctttgaaagagcagcctgtggtcttaatggttgagccatctctccagcccaggacattgtttcatacagcaatagtttagattcttgccagtgggttagctgaaggttgtgtgtttgaaatcttgatgagttttgtcaaaccatccccataatagaatgtactgctcttttacagcagttattttgagacttattttcagcattagctgctatagagaatatagaaatgacagaatgtgtgaaggtaggagctgtagcttgaatgtttctgtggacagctcagaatagactggagaattcagcaccaggaccatcatgatcatggggctgacccactgctggtgatttgagtggtcagctttagttctaacttctctctgcttccttgtggtagttactgtaccttatgtcttcatgaaatcacattctaaactgaccccaccatggaaatgatgcatgatagatccagaagtcaaatatatttgaaatacatgttctaaatttactaggatgaagttagaaataagtcccttctatagtgaagtagatggaagtagtgtctgggttagtgtgtctatgagacacacagcatcttctcagtgaatgttagtctccatttcaatattttcagaaactacatggctaataggcagcccctccctttcccgtgtgcctcccaaaacactgggtgccttgattttctgttggtgcttgtagcaaattaccacagtgtgacttcttacagcagagatttattatcttacctatctggaagtcaggacatgcatagcaagcaagtatgcttccagtttcacatggaacggatcagaagagaatgagttttcctggacttaatagaggcatggccccttctggagactctattctcttgccttcctgaacttccagaggcctcctgtattctggagcttgcaactgcattttcccatcactccagcctcctcctgattccattgttaaatcccttactagaaactttcttcctttctccctttgagaatcacttttacgatagcacctgaataatccaggtcattatcttcatttcagtgtcttagcccgagattagttgtagtttaatcatagctgccaagtctctttgagcatataatgtgatgcattccaacgtctgggggataggatgctggtcttgctgtgggacattgctgaacctaatggtagagaggaaggagaactacccagaagggtcaaattaggatgcccacaggagaagagagtatatttgcccccactaaagactagatcccaatttgagaagaatgaaattggacccagaaggcatgactccttgttgaagtcttgggtttggtttgttgaaagctgttatttgtaaaatgcatcactctaagtatgccttgccatgtaacactcatcagtggcaggtatgatgacgaactgctcacgtgaatgccccaagctatttagaaattttaaaagattaaaagaagccataatttgaagtcttgcattggaattccttcacttttaatgaaagtgaacccaaacaaatgtgtttataaacagtttcacatgagaaagcttagaaaggaacaattcattaacaatttcattaacattttctgcaggcacaactttctcttattactgtttgctattctttcctggaaattccctgaaaataatttaaacatgctatatctttctctaacacactctctctttctacgtctctttttgtatactttaatctttgacaggcacatgcattttactcttaaagggtcatggataaaaagtatgattcatgccaaaaatttttttttagattttgttttgtttggcagttttttttaaataaaggcatagtgtttatttcttacttttttcattcattgattcatcagacagaacttaagaatttcctatgtggcatgcataatacacaaagaaaatagacatgaaggcagccatattgaatatcttcaaggctggcaggcacctggcacagtgcagcctgtgaagtgaacacacaggaggtgttgactgaatggcattaacgtcattgtgtctgactgtgagatagcagagactttagaaatattaacataattttgtacaagtacagaggaaggagggaccatcagaactgtcagagaagattgctctggcatctactgatgctgcaaataaaggagttgggcaggtttgagatagttggagccgttgccagatagagtgagctatggagctatggtgactcaggatgtgtgcacatcgaatagcaatggttgtcacgagagtggcaggtggtgacgggagatgaatcacaggtgacttgaggctccatggggaagcagcttctttgccttatgaggaacttcaatcttatcctgtagtcgacaggaaaccagtagacgctttaacattaagaactaagaaaaatatcctttcttcttgctaaacttttgagaattgtaaaatcatcttatataccagaaacagaatacataatttatgaacacatgttcatgtacatctatttgttgttattataatatacaacaattatatttttgtttttgttgttgttgttgttgttattattattgagacaggttttttctgtgtagtcttggctatcctggaaccagttctatagaccacgctggcctcaaactcacagagatccacctacctctgtgccaccaccgcctaggaaggtacagcttttgtaattgtaataagtaacacttgactctgggcagttcaggagacaggtgggtctctgtcttataacacctctgtgtcttccctagatccattcattctggagaagttactactataattttaattttgtattaataacttccctgttgtttttttctcttcagagctttgctgaacacaggcatcatgtacctaaagataaactgttgttcttgaagtgtatataaaagaagaaatcagatgcgtttttttatggtttttgttttcagaattattttctggttgatatgtgagtaatcaaacttcagagttgtgaaatatttatagggtgattttctttttaaatcaatcatttggtttaccttcatgtgttaagattatgagaaattttcctattgtgaataacttcgtactgatgatttttgtacttgtttattgcattaaatatttttgtacattgtttactgaaagcataaatatgtccaagagctttaagagagaaattattagagcagagatgtatgcatttttgagtttgatgtcttttatctgaggcatgtattaatttacattcccaacatggtgtagaattgttttttcttcttatgcttgctgcttggtatgagcagacattttaatcttggtacttttactggaaacaagaaaatatcactgtagatttttattcttttgtagccctggtcatcctggagctctgtagaccaggctggcctcaaatctacaaatctgcctgcctctgcctcccaagtgctgggattaaaggtgcagcactatgctcggccccctttagatttttaatttgcatttttcctatatactcataagtgtaagcttccttttctatgttcattggccatttgtaatttcactatgaaatataggcctatcctttaaaaacttggctaggtaaatctcacaaatgtctattttattctacatggaactgtgcatttctttcttcctaacctttatttgaggcagtgtcttggggagatactgcttccctctagttcacaacaagttcttacttgctttattgtcttttgatgaacattcttaatttaaatgaaacatcaattctttttctggaatgtaatttgtgtcttttatgctctaagcctccctttctaaattagggtcttcaaaataccccccatggtaacctgatctgtgtcatctttaaattgtttcattttctcgtttgtttgtttgtttgtttgtttgttttttctgaatgctgaggcatagaatctgttcctgctgtttctctggacagtcactttttctctgagtattttaaaggtactcatactttccctgtaactcaatggcactgctgccatagtgctcccctcatggtctcccattcttggccattgttctttcatccccaggctttagtattacatgacatagtaatacttttgtcatttgcagagataggttgtgagatgatcttgactactctggctgtcatttcctcatgtacattacatgataaaggtaatcaaggttcttgaaacatctttattgtgggaattaccaatatggagccaggtaaaaatacaagggaatttattagggaaaagccttacttacagagcaacctagccagctggccggccagcagtaagtacagcaaaccgaagatgagatggaagaagggaagccacttgagcatccctcactcttaaaccttccctaaattgccctgaccacgccctcgcctagcaagtgtggctacagtgtcccctacacatcttgttgaggttttgattaaaatttaattgaaatttgacatcaggtatagaatcatcaatatgcttgcagtggagacccttctttccataagtatgctttctttctcaacctgtcccctcctttttagggtcttccaatgagctttttatgtgcttttaatatgatctctcatgccttttgctagtcttcccactcaggcatattgtatgcttctgtatttgtttcataagtgacaacttccaaaaatttacattgcaaactcatgatttttcatgcatagaaattaaactttgctatgaaaaacactcttggaaagtctagagaaagaactttctagttctttctagttcattgctaataaaaataccaaatgattgaaacttccatggagtggaattgcacataagcttacatatttatttgtccttcaaagaaacaaccgtagttccaaaaaaaattagctcagtaaaatgcttgtatgtttaggaagcaatttatacttctacatctctgaagcgatttatcaggaccaattatgtcttctggtatttgttgcaataataaaatattggaaacccaaattgcagttctagagatgggttaaataactatggcattcaaagtagttgagtgctgtgagatgtaaaggcatgcagactatttctataaacaggtatgatttgacatacaggataattgttaagcagaaaagagcaaagtataaaccagcatgcattgtgtatacaatatgcaaccttttgctttagagagaaacagaagtaggggtgtgtgtgtgtgtgtgtgtgtgtgtgtgtgtgtgtgtgtgtgtgtgtgtgtgtgtacacatgactagatgttacttgctttcttttgcagtaagtagtagagatgggtaagctagaaaggaatggatatggttgactgaatttcagaagcattatcctaatgcttgttgtttcacaacttctctcagtttttttttctattgttttttatggtaacttgtattgttctagatgttcatctagatttgtagcatgctggcataaatatcaagtgtctttctaatttctgctacatatttatatgccttatctcaattctactattttaacttgtgctatagccccgttttcttctttgctactacttgtcagaaatgaactaatttattattgccataaaggaaccagtttgggacttcactgtatttgtgtcctcttaaatttattgcttttattatttcttctcctaataaagacaaattgaatttttccttaattattaataatttattgtttgttggcataaacattacatgtcattattctcccttaaaaactgctttagctgaatcccacaagtgtttacatgttaatatgtagttttaacttcctaaaaggtaaaattaatcaagtctgccttttccagactttctttttcttttttttttttactcaactctctcattatcaaactttcatatatgtcttcagctccattctgggattatatagtttctgttgactgtcacacagagtaatgaggtttcctgtaaaactctggtctttacatttgtatcatgggaattctttgaggcctccatttatgtgcactcattccaggatccttacaaaagctcagggacttgtataactttaaagcatcatcgtagtcgtgttttagacctcaaaaagtacttgagttcagaacacaaacccagatattcatttagaaattttcaagggaccttttcctcaaactatctacccatagtcaagactggtttgtctgtagcaaagtgagtcttaccagtctttttcacagtaggtgaagttttgttttgctactgcatttgctttaatcatttggaaatccttgtttcaagtttttatgtctctcaggaggcaattcccaaactggacccatgctctgctgcttcttactggcctcttggaagtcacactctagcatacatgcaacagggagaatattttgccaactcttgttaactcaatttgatggctagtttccttgtgcctcttaagccatcctctcactcttttaccaggttagccatcttcaaagtgctactttggaaaacatttcagccaccaccttagttgttctgtgtcagaaaggattttcctgaatactgcatctactacattgttgggagtaataagtatgtaaggattgggttttggattttaggaatgttaatgaattgaatatagactaacctcagtgacatgctaaatctgataattaaatattcttgaatagttttatggcaatacaatttaacaaaatgtcgagatcacaatttttatgatttattcacacaaagatgtaggatttctgtagtcatagttttatggtatagatatttatgattaccatgttgtaaataagaaatatatctcaagacctatgtgtcaatattctatactttcttgccagtaaaactttgctaaatgtttttgtcatcagagggccctgaacagagatcaggccatggtggtgctgagaaatgggaattgaagcagcttttgatttctctaagagaagataaaagggtctctgcagtaggaaacacttgactgtggtcagtttataaaccacagtgagaaacctttcactgcaccagtgccttaagccatagtgggaaacccttaacagcatcagtctcacaaagccatagctgctttttccagaagtctacaaagtgtggttcacgccatgaaactggattaatgcaaattctcaagcctgaccttaaacctttctagtgaagaagaaactctaggggtagggtctagaaatctctgttttgaagtaagtagcttggtggttaattctgtttgcatgtttgagtttggaaacggcaggcaggaatagattgtttagaaaagacaagccaataatttagtttgtgacactatttgtaaggtatatagaaaaccaaattatttatagtaggaagaaaattggggttaggcgtggcttagtggtacagtgtttgctcggtattcttgaggctgtcgatgcaatcctagttagtactcagttcatggctttcacatgtaatcccagcattctggaagatgggagatttcaagtttgagaccagtgttggctaaacagagagctctaggtcaatctgagctatatggtaagactctgtcttaaacacagatataaagcaaaacaaaattcagaaattacctgattttccactggtagacaaattgtaaaattaattgtgatctgagcatttttttgagacatggtttctctgtggttttggaggctttcctggaactagttcttgtagacaaggttggtctcacagagatctgcctgcctctgcctcccgagtgctgggactaaaggcgtgcaccaccacctcccggcttaacattttatgtaattacatagcaagaaaaactatttaagaatgtttgattatcaaaaagtctgttatatttaaaatacgtgttcaactatatgtacatatacatgtttatggtgacatttatagatgttcagatttgttactctttggaaacatgtgaaaggcattgttgattctccatggaatggcatttagggatgtttatgtaggtacatatacatacattaaatggatatacagtcattaagtgtttctttcgtacatctatgaggagcaagtgctcattctatatctatcaattagaaaataagctgtgtttgaaataggagtaaaactgccttgtgctgcaagtttcagaagataaatgattacaccccccctggctggctttcctcagaatgtctggggaaggaagttatacacagacatcctgatctggcaaatggtaccaggccacatggtcactgggttcttctcatgggatattttcaggcaagtttatgatacctttgactagttataaatctccgaagtttgagagatggagatggagtgagaacacaggaaatgcaaaaacctttttctccacgatcttgtagtccagaaaatccccaacatctggctcagggaagccaggaaagatatggtttaccctggcagctgtccttgctgagggatggagctgctggcttcatgtcgaatagggaaaacactctgcaatggtttgcaaaggattttgttcccaagtggaaaaatcttcacacacatcatactaaatgagagagagatttttgagccttttcctgagggataaaaatgtttgaccttatcagaattggtcaaagccaagactgttggaagcaccatctgctcttttgttttttaccatctaaatgaaaggttataccctagagtacaaagctttacagaggcagtgaatacacctctaatagttttttctttttactttattatgggaattcacaaaatcaaaagtggacagaagagttccggtgatttcctgcttcatagtggaaacaagcatgtttatttttgaggtgcttaggctaataaccttacttactcctgttcatgagaatctcttccttttgttggtatttggtttaggagaacaagggtaattttgttttattgaactcttcccagccacaccttgaagaaggaaactcatttccttgttgtcactattccccaaagacacaactgtcattaaaatagactactcattttaattaattcgttttctgtcattttgaacttctatatctcaaattgttaagatttttaaaaaaattgcttcccaccttcaaagtcactttcagaacagacaaatctaccttaaatggaagtttcaaatagagagtcctgctttctcattgatttcatactataaactctgattttagttcctctcgaagtaattggcataaggatattatgaagtctcacttaaaactttagctcccttaaagtaattgcaggaaatattagcaatacccaagttaagcaacagttaaaacacagaaaaatacaattaaaacaagactgaaggtatcagtaatatagttgatggtcatataaaacacagcaaataaagatacagccatggagttcagagccttttatagtttcctaaatattaccataccacagtatgttaagccttcaaatgaagtcatggtttcggctgttacatccacgttggctttaatattttttttaaaattactttactcactttgtttaatttcccccatctgtgcacttgccaaacactcttcagatcgtatctgttgagattcttcttggtatcttcgttgaggagccttgaaggagaatgaaaacctaaaggccaggatgaacattgactggaaagatgcctcctggaaagattcacccactttgcatgctgtctgcagaacatctctggtttagacctttctttgccatcagcacatctactaaaatgttgcaggagctgtatagttccactgacatactggtaattactttcttcttagggaatgatactcaagagtctcctgaaggtcttcaaccattacttttccactagaaatattaatctggtttcttgttaagaaaactgtttagctttgaaacaaagaacccctgttgattaggtctgttcatcaaatttgggaatagcttttattggcaggaatgagcctggtttttggcagaggccatgggaagcttagctctgttgttcaatatatgtgaagctaaattttatgagattcagtgttctttaccaccccaagcctcgatatgtgtggttacatgataatgaaagttaacctcatggctgtgagctttcagattaattatatcctcggctttttggaagtcaagtactcttttgctcttctctgtaggtgaataagactattttgggtggagagatgtgtgcttagaaaatcctcagtgtcagggaattcctacttggcattaaggtatgaatattgtaaatgtgtagtcagcaaaataccttaggtattagagttgaattatgtgcctcacacactgattgactcaacacagatcccatcgtgagtcagtactatgtcagatgcagaccagccttcagtgaatgtattcctctggaagttaagacttgtaagctatcagtatttaccaatgtgatgtttccagcgtgcctcctccttggaatgaattaatgaatgtgacgttcctgctctctttctcctacacatgttatgcttgaaaataaatttcgtggaagaaatatctggattcaccattcagtgactttaggtttttgaatttattgagatcattggagattcgtatttacttatatacaatgaactcaagaagctagcccccaaacaccaaacaatgcaattaaaaagtggagtgcagaactaaacagagaattctcaacagaggaatctaaaatggctgaaagacacttaagaaagcccttaacatccttagccatcagggaaatgcaacccaaaacaactgtgagataccatcttattcctgtcagaatggctaaaatcaaaagcaccaatgacagtctatgctggaaaaggatgtggagaaagaggaacacttctccattgctggtaggagtgcaaacttgtacaaccactttggaaatcagtatggtggtttctcaggaaaatgggaatcagtctacctcaagatccagcaattcctctcttgggcatatacccaaagattgcacattcatacagtaaggatatatgttcaactatgttcatagcagcattatttgtaatagccagaacctggaagcaacctagatgcctctcaactgaataatagatagagaaaatatggtgcaattacacaatggagtactactcagcagaaaaaaaaaatggaatcctgaaattcgcagaaatatggatggaactagaagaaaccatcctgagtgaggtaccccagttacaaaaagacagacatggtatgtactcactcatatatgatttttagatatagagcaaaggattactagcctacatttcacaccaacagagaagctaggaaacatggaggacccctaagagaagactgcatagtccctcgaagaaggggaggtggacaagaacccctgaacaaatttgtatttacttataagaaataaagaacccttgtgtactttggctatttctcctaggattttgataaatagtctgggtattggccttgggtgtgtgtgtgtgtgtgtgtgtgtgtgtgtgtgtgtgtgtgtgtgtgtgtgtgtaccaagcacttgtcttaatgtgtagatgtttgtactgaacaaacagtcaagatactgaatattttccataccactatcatctctctttcgcttttcataatttcaccactttttccccagtcacactgaccttaattttcttcaaaccagtaaatatatcctggctaaaattctttcattccaaatatgtgacataaacagaaccttacagtatgtattctcttataattggctcttttgaatgcagcatgatttattggagatccatccaattttttacgtgtatctaaattttagtttttacatctgagaggtggtgcacagtgtgagtgttccacagtatgctaatctgaacattaacctggtgaaagacatgtgggctgattccggtttgacctattacacataaaatctgctatgagcatttgtatacaggtttttatgtgcggtcataaatttccatgtccatgggtgaatgcctaacatgtgatttctgggtcatgttgtaattttgtgttttaagaaaactttttcagacttacttttttttttttgtttcctactgtctgtgcaggagtcatccaacttctccatgtccttgcaagcatttggtgttatcacttcatatttcagctgtccccttaggaacaaagagctctctcaccatgattttaagttgcattctctttcaacttacattcaacaagtgatggtgaacatctttccatttggcatctgtaatgttcagtaaaaccactgtggatgccttctctttttgtaattgagtagctattttgattatagttgagtgttctttatcttctgtatatctgtccctggttagatgtgtgatttgcaaactcttacccagcttttctgcattttatcctcttcccataatctttggccaagaagttttatttttgatgaggacaaacattagtattttgcagatcatgctttagtaccaagtctaacaactctaattttagttcacaaagatttatttttctacatgggccatagtgttatgctttacagttaagtccattttcagttacatttttgtcaggtctgaactctggctcaagttaatatttttatttcatttgattgatttattgattgattatttatggttgttcggtgaccctagcaccatttgttttaaagactagcctttcttcatagagctggtctggagactgtcatgtgcctgtccagcatatttatttatcagaacctactttgcagttctctgttttgttcagatggtctgtgtcttcattaacactacattgctctaattactggaactaattaatgactaatagcaattagtgactgatgccataatattaagcactaagattttctcccttttattcttttttgttactattttaactgttctatggcctgtgtcttttcaaatacatttctatttgagtctgtttacctttgtcacttttaaatatcatcttgaatatcagatggtgttttaattttaatcaccaacctcatgaggaaaattataatctattgcatgcagcaacgcacctgactttctgtttatctgtttcctttccagtgatctaggactatttcttaaattattttctttctgttttaaatctttttctatcagtctttaagggtaagtgtcctaaagttagattctttgctttttttcatgagaattacaaaattaaaaaagaaaatttcctttgttgcataatgatttccctacatgtaacatttgctaccaagaggccttccaatttcagctgttgaaacaccccattctgggctctgtggattattattattattattattattattattattattattattattaaccctagtcaatttgttcaggatgaatcccggtgttaggttagtgtattgtatactagaaacatacctcagtaaagctggggtgaaatctcagtgtcctttgacttggtgttccataaatagtatgttcttttctctgtctccttttaagacatttttcttcatctttagtcttgaaatttttaattgtgatattatgtggagcccagcagtgatgaccactcagacagtttgaaagcaattaaaagtctttattccagcctggtagtaccatgctcacgtattcagggtttttttttagaatagggatttttttaaaggcaaaaaccaagtcctggtatcacgcttagcagctgcaggggaggttttatgcaagcaaggagtttaacagaagctaagtcgctggagggccttgacctcgggttcccagaatagagttgggtaatgttacatagcaaaggtcaaattctagttaaacctaaaatggccttagtaagaaagcaagatggaggaacctctgcagtgtctcaccctgtcacactgcgtcttaatgtagattgcttttgagtcatcttatttggatttgttgtgtatttttaaattgcagatttgtatactttgccaaagtagggcgattttagccatcttttctgaaacacttgctcatctccactcctttctctgaactctgaaaacaaacaatgtatctttaattcttggtccaccagcctgtaagcctccattaatgattctgtatattacctctgttttaatgagattgggcaacttctacactcagctccactaattttatccttggttgcctcaccattgagcccattagataaaattttaaaatttctagcattttccaatttataacatcattttatttttatagcttacatatctttacttgaatctcaatctctcttgtttcaaaagatcttacaacttatttctgaagcctttttaaatgatgaatgcctttaaaagtctttttaaagatacttctgctttctaagttatcaactttattctgatgttctcatagttgattgcctttttctccatacaagttggtggttttcttggttcatggttgatgaatggatttcaattttatcctggaattctgtctgttgtacctgtgagtgctgatttttatttcagccctccctatgggcagcagttcactattgcagtttagtgtgtgaatctttgcatgtttcatggggagtggcaatgtagctcttagagtccttgtgggactttttatttggctcagtgtatggaatatctcagagttggtccttggctgtttctcagtaggagagtcctgtggtgggattcttgccttagtgtgccctggaggtgaaaatgacagactcatggggacaaaaaggatcccaagactgagtcaactgatgaatatggaaccttcttcatgattctgttttgcctagcccaagttaaaggtgtatactgatttatttttctctgttattttctatctttatctgtttctaagcctcattccatcctctttaatgaggtaagtttcagagagtctgttgcatttggtttgagtaagtgaagttaggcttacaggacctcatccagattgatttgtaattcctgctaagccatctccattgtgctttagctttagtagtgctattggatctggtgctgcattctcatgttattctgttgctgagataaagcactgaccaaaagcaacttggggagaagagggtttagtttaaatttccaggttacaatccatcattgaggattgtaacaactcaaataggaactgaagcagaaatcatgaaggagtgcgtcttgctggctcattccttggcttattcttagatagctttcttatgcagaccaggccctactgcccaaagatggcaatacccacagtgggctgtgcctgtctacatcactaattagacatggccatgggattatctggtagaggcaattctttagttgaggttccatcttcccaagtgattgttgattgggtaagattgacatcctgcttactcaacagcttcaacgttctgtctcatctgtgaattcctctgtatggctcagtgtagctggtatgaagtgcttggtggcctcatgtaaacaaatagcttgccagcttggtgccccttcttgatctgtgaatgttgcattccctcgattgacagtatttctagtaactattaggtctcatgtcaggatactcaatatttaattgtccagtgcttgaacattcacagatacagacgatactgagaagaaagaaaggaagggcaatagtggtatggaagtattcctacttatatgtagcttgagattagagtgggggtggtggatggggactggaattttgttcatatttaacatatttgactcataattaccaaagatccagagtgaaataatttgcagcagcaccatttcccagccatgttggacttctgaagtgctgaaccagcagctggaactatgctcagctcactgatggttttagccaaaggcagagtgtatcttttctgaggaaataggtgcttacagtgcagaaatacaaaatactactgttctctgggccctgtggccccaaggtattgagaatccatttgctacttttaattttctataaattattctataatttaactaaaggagacttccttttccttcagggaagtcactcttgacagttccttgcttaatattttaaattaccatgactgattgagttctcttcctttccccctataaatgaatttataattggtgtgggcagaacaaactacgcagtttatactttagcaatatcataaagttttaattgaaattgggagtgacagaaactacatggaagcatgaagaaataatttttttacaaagattattgcaactgtaagtcacttgggcttgcgtataattctccttccactgtcgccctggttcaactgagtgctggtggatcagtaagccttttgttctcttgagtaaccctgtgtttctctcatgcaaccaaacctgccatcattgctaaattttccttgtcccaaagctctcttgtgatgactagatgacattatttcttaagaaaaagaattgacctagtgctagctgttgttaaccacatgccttttgtagaggaagatatttctaaaaggaacacattggccttgtagtccaaatttttatacataaagaatcagtgccctgtaactggcagttcctgaaggtatggtttttctgttttgttaacactcatatttgaattttagggatgggaggaatagtgtggatttcctcatgaagtaatctctatgtatagcaagggtacaaatcgcaggatgtagttgtttgccctccatcttgactggaactctggtatcttcttatttagacaagtttgaaacattaacattttctccttctattcaagatccagtgacccactggtgactggggacttcattctcctagcttccttttggctaacttctgggaaccttctctgctggatagggagggtggggaaaataagagaaatagaagtactaatttttctgcttctgaagatactattggtgaagatgaaagtacccattgcctaaaaacaggtcagtagatctctacttccttactaggcttgcttcttgtaagcaactaatatagaaagaatcttatgggttatcataattaatattgctatttagttttcacattcagaggctattaaattgatagagcatcttattaccctgcgtgtataagagttcccagttttcattaaccaggataaaaaggaaaatgtttttaaatcacagtccatttgttaaaaaggaatgtggtcagttatataatcaccctactgtgtagcaaaaggtaaacactagagcatgcaacaaagcatttcagtgttagaaatgggaaggactaggtgcatagctagctgtttggagactggcattaggagctggagcaggggacacagggaagagatggagtctccataccaagatgatctggacaggagctgcacttcataaggtggctcaaagaaagagaaaaaataaaataaaagaggcaggagtcagatggtttttgtttttattcggaggctgagtaaatcagtctcagaatcagtctctgtgtctgtctctctctgaagtaaaggtactttgtgccactagaggaagtcaaattatgaaaaagtatattctggaatattgtgttcttttctgtttgttcattgacagctaactactatagtgttgtggttttattccaacttgacacaaaccagagtcatttaaggaacctcaattgagaaatgccttcacaaggtcggcctgtgggaaatcttgtggtctattttcttgattgatgactaatgtgggagagcccagctcactgtgggtggcaccagccctgggttggtggtcttcctgctataagaaagaaggtcaaggatgtcactatgggcaaaccagccagcagcactcctccgtggcctctccacatgtttttgtctctaattccttcttgagttccttccctgacttccatagatggtggactgtaagctgtaaggtgaagtaagcccttctctccccaagatacattttgttatagtgttctatcacagcagtagaaaccctaactaggacaagcactatgtggaaacaacacatggcattttgtgaaggtgtaataatcagagaggccaatttaagacttttttaagcaattagttcgaacgtggggtaagattagagttgtgtgactctttctaagggcaggtgtgggatctgagagcctgtgaaaaataccttagaatcctttggtcatctcctgactggttggatgtcctgtaaaaggaagattgcagaagacagggggctaccatccccttaggaagactctggttttctggactaggcatggcacaagaagtctattgtccatggacacagaaaagtagaacatcacctcataactgcaaccctgaagggttcttaggctgcatttaggcctgttacaaactctgattgtagcattcttttatggagtctcttgtgagaaagttcaagcagtagagatatgataacaaaaagatggatatgccagattccacccactcacccaacccagtatctacccacccagtatccatccacccatcatttgcctacccattgggcttggaacgtttcattcattcatactgttggtgcagcacgccatcttcattaaacctgtgagggtttacagctttgaattttcatgcatttcatcccttccgttgcaaggctgattaacaagaaagagatcaatttaccctaaaaatgttctaactaatgatttagttactactaacacgcattttcaagagaataaaatttagtttttcacaaccccctggtttctagaatggaagacaagactgataaactgcaaaataagtgcttggaaccaaaagtagtcctaaagtgaacaacagcctatgtcaggcaagcattgcaggtgtcccctggctccacccatcactattctgaccctagggagcaaacctgactaattcgattcttcagagctggatacctaatattcacccaccttctccttgttcattatcactttcatttgtcttccatttgcttaacagaacctgctggtgcctccttgacccacaggcttttagtgtacatctgatttctattagggttctctagattcacagaaattaagggatgaatctctctctgtttctgtctctgtctctgtctctctctctcttctctcctctcctctctctgtgtatgagtaatgtgatatatatacatatatatacatatatatatgtatgtatatatatatatatatatatgtatatatatttgcaataacttacatgttgcagtccagctaagttaacaatggctggctctgaacagaaagtccaagaattagtagttgctcagttccacaaggccagatgtctcagctggtcttctgaatgggctggaagcccaatgccagtgaaggaatagatgtgctagcaaggtgaaggcaagcaagcaaagagcaaatgcttcccacttctatgtccttatatagccttacagcagaaggtatgggccatgttaaaggtatgtcttcccactttaagatttggattaaagtgtgtgtcttcctgcctcaagatccaaattaaatccaggtgtgttccagccttaacttcttaagtatgtcttcctatctcaaaggtctggactagaagtagattcatctacttcaaaccaagcagaaagtctctgacaagtatgcctgcatttcatttatggactgtatttcattccagatatagtcaaattaacaaccaagagtagcttaagtgtatatgaaagccaaggcctaagggacagtggaagagagacttctttgccaaaataatttcatagtagaagtactttccttgttgaggattgcagaatattttacagtgtagatggcaataaaactccctgtatctatcgacccctgtctcatcgtctctcctctaggtggaaagacatcctctctgtccctcctcatgtatgtttcacatgcctggtgattctagtgtccctggagatctcccactcctgtggagatgaactgtctcatttattccctgttctgaaagcatgccccaggcctcctcctgtcttgtgaccctgctagtctgctagtcagcctcccttcctcagtttctgctgtggtaaccctgttctcccagcctctagtcatttgatgtgctccccacatgtcttccactcgcacctcatcttcccagtaacactttaagttgtttgaaaataggaatgatctttctcttaagcttttaaaaagttaatttttaaaactaacaaaattgctgggttgtgatggtgtatacctctcagcactcaggagacagaggcagatggatctccatgagtttgaggacagcctggtctatggagtaacttccaggatagccagggttacaaagagaaaccctgcctcagaccagggtgattaacatcccacccacagcttccacctctgtgatttcaaccaaccttaattataaaatatttgggaaaatgcatctatgctaaacttctattcaaaattagctaaatcagagattcttaacttgtgggttgtgacccctttggttacattacaattcataacagtagcaaaattgcagttatgaagcagctataaaacagtgttatggttgggggtcaccacaacatgagaaactgtattacagggtcatggcattaggaatgttgagaacctctgatctaactaatcaactattactactatttttgtatcactcacattgtacatcttattcaagtaatttagagacagtttaaaatagaaaaggtatgtagtttatatgctaaaatgatgtcattttatatgtagaatttggacatctgtggatttaggcacctgaaaaggattttggatccatctccaatgggtactgaacaacagcaataatttaccatttacagcatattttaaagtgtgtatgcctgtgcaatgctcatattgagctcattacctgaggttagcattttttttcagtatcactcaccatggtagcatcactgagttggttggaggcactggattgatacaaactgagtaggttgataactccatggctgtgtgcctcatagcaccaaagagcctcctattgatgaagaaggtcatcagagaccccatctctccatcttaatcatttttaaactgctatactattataactggggataatgtcatacaaaaacaaaaactcatccctgaccgttctcaaggttgggacatcaaagatgaatgtggtagcaggttcagtgtctggtgtgggcctgatttctgcatccaagattgtacactgaatgttgtgtcttctataagatagagatgctatgttcctgaatggtgaaagaataggagagaatggatctgcttctctgagtcctgatcatatataattcatgagggcagaaaatgaaatatgtttggagcgcatttccagaccctcatgttgcagcagagtttagttccaatctgagtgcttgaagcagtctgaagcattcagatgtcagcctggccttgaaggaaatgagaagagctggttttaagtattaatgaaatttccctgaccacactcgaaactctagaaatttaagattgatactagaattataccttactcttctactgatcatagtaaattttgattcatctgaagcatgaaattgtaaaataatgcataatagccttaaatcaagcagtgtttaataagatatgcctagaatatttgcattcatcttacattttcatcttcttgagaaggcttctctttctgtatggttaagtactttccatttgtaactatatctatagatggtagtttttcagatgcatcttccttgttaaactacaagtactatgaatatgaagccccatactctcttagctgttccaattggaaatacttttataatcaaagtatctatacagtccagtattgggattgcattcctccgtcttgaggacaggactagatgcctataattttttgtgtcccattcatggaagagaagagagaagtgatgatagataagatgggggagcttgtggtggggaaaccagagtattctggagaatccttattcttatagttattgggtgaccactaaatgtcagaaactgctgccaacctgaaaggaaaactgtgaacagcacagatggggtccttgcgctcacacaacttgaaagacctttcaagaaactagataaatttacttccttggagttatgagtcactgaaggaaaacagcagggctctttaaggcttttcgggggggggggggtttctctcaaacagctccctgagagatcctgaaatgcctttattcaatgacactgagaaaaatcccattctcatgtcaggaaaaaattttcagcatcagaaactataacgagagccgatctgtagtccataaggttaagatatctttattcagataaacaccagccaaacgcaagccagtgcgtgccagggacagcaaggcaggcaggccagagagaggggctcccatgttccttgcagccccttaaaaacctatcacgagtcttcctgacctcaccttgaccatgctctgacaggcgtcctcaggcacacctgtagccagcctctaactggcgtggcttactgtcccctacaagaaaacagtggcatatttatagcctctttgacgccagcttgttaagcagcatctttagaacagcctgcttcccagaaacatcaaatgcttgttgcaggctatggccacactgaagccaaacattctgtgacatcccatttcagctttgcatgggatgctggtagttaaactgctagtggcactgttagcacaagcatcctgagtgagccaagacacaaagcagttcctaatccctggagtccagagatgttttgctggccaactggtgtcatgtagaaacctctggaccttggaactagatgatgataatggatctagagtcttaattctatgatttcatttgtattttaggaatagtgatgaccagatacaatttttagaccctcaaaatattccaatggcagacttttaaaactatttttgtgtttaatagtgtgctggatccagttttggagagtgcagggagacataaactattgggctgttgcttgttgcagaaatacaaacccaaaaagttgagacatatcatgctgcaaaatgatactacttatacatgaaaccccaatgagaatactaacctgaagagtatagggaacagagatctgtaagacatcagtcttctatgcaactagctgggatcagaggtccagctaaccaaggttccagtgggctgattagctttcagttgcaatcaaggcaaattgattttgtgcatgattacatataggcaagaaatgatatgatgcccttttgtgaaaattaatgatagcccattcataagcccagctctaattcactgtgcaaataggaaactgtgtcatacagctaaacaccaagatttagagatctaaagtttagaggaaatagactttcttaggaccctctttagtgaggagctgaaacctggaactggcatagctagtagtgaacttgtcctctacatcagaacccttatgagaactggaggtggcatttgagctgatctttccagtctgaattatgcctattgaagaagcactgtgagcaagcacagcgggacagcgtgcacaggagccagctagcagaggggcctgtggatcagggaatgacagggagaggtgggaggagatcttacatttttctttgctgcccccttgctagtcttctgaagtaaagtgaagctacagtatgcttttggagcaccagagaacataatccttttgttattcagacacgtctattggcaagtcaagaagtgaaagacagtatgaggtatgaagctagtggaagggcaggagctggaaacctgagactgtgctgcggtttggatcttgatggtccgcccaggctctcatcttaaagacttggtcccttggaactttaggaggagatggagcctgtaaaagaaggagcctagttgaaggtttttaagtcactgtgggaattcactcgaatcgaattgtaggaacccaactgtaggaacccaacttcctcctccctcgccttgtctttcctgagtgatgaggtgagtaatttttctccaccagattctcctggcccctaacagatacctaaaagtcatctgaaaccctgaacagatgcctaaaagtgaggcatctgcttgattatggtctgcaaactgttttaaagaggcagggggaaatgagccttttctctctttataagttgattgcttcaggcattttgttatagtggcaaagcagtgatacctcatgtggcagtgaggaaagatggtgaggagagtgaatagccatgtaggtcaggtactgaagtatggggagaaaattctcaaaggagatgtggcacattgatagcaataggtcagatgctgagaagtattgcagccacgtaatcagctgtgacttgtgagtgagtcccaggaatgcttttaaaggaaactcataccctggcttatcatgtattcatttttgaatgaatcccctgctgtctgtgggagttcctcaggctttttgagcgttctaactaaagagaaatggcaaggccaattggctggtcaaggactgttttctagatgtttccagagtggtagagttgcagaggtcttggagaaaacatttggactgagtgcatgactcatatccgtaatacttcaagagcctgtgtgggacatgaagtagtgcagacactgtcaaccaactccacagaaaagaaagcacaccccaagttcaggagatgtggtgggttactagacagtcctcagtaaagtttgttccctctgtggccctctcacattctccatctgtttggtttgttttcttgttttttttttttttaaagttatgtgtgacattgtctgaatttttaatatgtaactaaatgagattcttatagaattgcttaaaaatttgtaggcttatttatgtaatgagacagctcagttttatttatgtgaagttttaattctgtcagtttttctctcccatagttagtgattatctaagatgatcacatgaccctcattttcacctccctgtcgtttttgaagcctgcactttggtgtcagttggcgagggctagcattctgttcaactgttagagctgtaaggcagaggatgggcctccactgaagatttttcatgctgtaaaaactcgttagttttgattctgttgccttagatttgtgatagtttaggtctggcaagtgtgactgacatggagtaaaatgttcagccttttatgtagaaaattgtcgtgatttcttttccactaattttcagaatggtagagctgaaggaactgtaagtacccttcgtgaatgtcttacttggcagataaagagcccgcagtacgaagggcagaacactgtttgagagcagtggagccctggtcatgaattatcagattcctgggatttcaggtacaaaaggaagcccattttaaatcctaaataagctttactttcaacctggtattgagagctaccccatcatttccctgtcccccacttattccattattcatactgtaatgctatccttggatcccagaagggccttaatgtaagaggagtttctagcctttacaatagtagaaatacagcctctcacactgtctatctttcaagcctgccctgaagtggccatttatagcagaatgaagaaaagaaaccagcatgacctcttcccttcatggttgatgatacagtctacagccacagtttatgtcctgtttccaccaggaagcccttagttgagccaccagcccaatggatctcaaaggttcttgagtggtgggaaagttcaaagtgctctcagtatcacctgtcctgaggatggttgctgttgcatagtctgctctggaatttcagaagaaaaccatgtaagggctaaaggtactctgcatctttcccagaagccctttgggcaatggcattcacctttgatgaatggctttgggtgttcagtgaagcactctgattggtgtaagaccaagtgcagggtacttgtgcacacatagagtcacacagctctgcatgctatttgagagggtgatatgtctgcagatccttgtagtctcatcaatggcacagagcaaactgtctctctacgagtcagcaatttccagtgtacagtgagtaccacccagatttgtctcatgtggggtggatacattacaactttaacatatactatagtaggttatcctagataatttcatggtatgtccagtctcttgatagatgtgaaatattagtaaataacaaagggcataataacgctgctgctattattaattatgatcactagtattaatgatttgtcgttttctaggctctgttttcagccgcttccatgtgttaactctctttcataatggtttggaggactgttactaacactgactaaaaggtaaattaagtaagatgggatagcaggacctcataggattgacaggggacttgagcatcatgcttgggatgaatgaaaccaagccatagttcagcattgattagtgagtctgctttgggcatcagcaaactttctctgtggtgagaagcctccaccaaattttttcacaattaaattagtcaaaatgtagtagtagtaaggagggctacctggctctctccagagtgtggccagctcttaggttttccctccacgcagcctggacttaacggagactagggactggcctgttccctagaggtaggggtgaataaggaaaggagagggactgtgggagactgataatctgctgctgtccctcctggccatgggattcatgacttagtcattctaggctatcccttagtttaacgagtgaatgaactgacggtgatggaatccatgccaagtgtctggtgccagcaactgaagtggttccctgcccacaccctgggccacaagactttgccacatggtcttggagaggagacagggagcacagcctgttttcttaaaaagaaagaaaagaaaaaagaagaaagaaaataaaaagaaaagtcattgagctaattaccatattaatgtaggctgttttcatgggaaaagaattttgtgtgagggaatgagtataataaaatttttattttatatttaattagacactgggttttcagatggcctgagacacactgatacgtgaagagtaagtttggaacatgttgggattttacaaggattattgcataaaatctgttttctttctcctctgtagttttccctagttgcccatctcttcagctgtggcaatgttcatggggcccaagtcctcaggacacacttcccagtctcttcttgtaggtcagtgcagatgtaatatgtgcacagagaagggcatggatatatctgtcacatatcctcctccatattctcacatgccttctgcctcaggctccacagtagctgctatcctgagtatcccctttgccaggaggaatcactgcccctatgtctgtaggatgtcatgacagggcagaaaaaacccagctctgaagccagatagacctggcttggctcactggttccaatcgttccttaaaactctccattccatgtttcttttgttcttcttttatcatcactgaactccacttcctcgctgccagctctactgttagactcttccagtatagttttcctaccagaagttggctattttaatctctagaagttggatttgctttgaaatgtcacctaggcctcttcttaactttgtgaatataaggaatatagattatattatagtggaagcagtataatactatcttagtgtctttgtcagctatttctaacattgatgtcaggtctcacatctatcaaaggagttttgattcttcacagtggtcatgctttcccaattctttcaagcctgggaatttgggaattttagatactattgggggaggattttagaattacaaacaaaattgatagtagcatttacagactcgcaatgtactcctacttgccagcttccccatgatcagcatccttcactgctctttagattgatgtgcctatattgacacaatatacattttcccaagcccatagaatacatgaggtttcggtcttgatggtggttaaatgcctagtgacatccatccatcattgtagctcttgcagaggactttcactgcctaaaaatcctctgcataccacttctttcttcctcatgccatggctctgtctgtcactgatcttttattgtctctgtggtttgtgacttcttcagaatgccatgaaaaaggatattatggtatgtagccttcacattggctcctttcacttagtaacatgaccctcaagttcctccttgtctttttatatttcacagttcatttatttcagcatagaatagtatcccaatgcatcctgctttttttgttcacctactaagagacctcttggttatttgtcgattttgattattgtaaaggcaagactcacaagggtcaaagtatctttgtttacttgcatcccagaacagatacaagaataattttaggcattctcccaacaataagaggttcctaacaaaataccaagtttatgtgtgtagttcagctacttatgtatgtagttatgtatgtagtaatcaggtccctgctgaatactttgggggtgctctgcaggtcttctctctgggcttttcctctgtgtggtgctttctagttgctttcctgtgtaaactcttgctcatttcctctaactttaagagttttctgtattcttcctagtttctccctccttgtgttgatgactgaaaatttcctacaggcctgcagagggccagaaatacacctcacattgtttctgatgttctttggggggttgtttttctcttgtgtcctgaggttctgtattctgacaaatactgtcctcatgttttgtgctgtgtgtttgagagcagagcattactccatgttgactgacataaacagggtggactatgctcatcactgtaggactcacagggtacttcttattagctgtcagttcctaccccaaaaatctccacaatgaattaatccacgtagctaggtgctctttcctttccttttaaaaatgctgagagctgcaaatttgttcacacttatcgagcatctggttggactccttacatgaggcttgtgaagtagaaagcagggacatgggttctgtctttgaccgtaatatgatcatttaccaggcattcatctgagaggactcaagaaccaggcttttgtatgtggtccatgaattgttgttctctaaattttttttttagattcattttacttagatgcatgtatatgcactttgcacatgtctgttggatccctcaaaaccgaggttatggatggttgtgaggcaccctgtttgtgctgggaattgaacccaggacctctgcaagagcaacgagtgttctgctgttaaccacagagccatcactccagccccatgaactgtcttcttgacaggagaaagtagacacgaggaagaagaaggtcatttgcactcccagtttgttggtcagtgcctagagagtaggagatattcaacaaatgtgttgctaaaatgaataaagcaatcacattgatcatttgagaccatatttactgctgcattggatgaaaggacgtgaaaaaacatatttacggctgtattccataaaaggatgtgaaaatattgccatctcctgtgcagagcagttcagttggagtcttgttctgcactcctgctgtgctcctggcaccgttctggccattgggcagtggtgatgaatagtgtagaggtctttcgggttgtgcagaacatgagctacctcacaacacttcagagagaacttaacattgtctcacaagctgatggagtgcttccagccagaagtgctgtcgaacctgcagcctgaacacagggcattagatgcaagggtacagtttaaggaacacccttcttgtaatgccccatcttcagcctgggaagataaacatttatgtgtctccttttgttctggttaagagctgttatgtaagatggactgaactgaaaaggtgaaatggcttccccatcattgtagagtgcagtatcctcatggtaccctgttaaaatgagaagaccggaatatggttccctttcatgcagatcaattttcaaagggtcctagcagagggctaaggtttacataagtgcttgtttaattcagttgaggacatagactctgagaggtagcaaggagagagatgggaggaactgctgtctgtcctcccagcttgggctgccaacaggagctcatctttctccagttggtctggctctgcaacaaagaagagcttcagttcagagaagcatcaggctgcatgcgtgctgagcaagagggtggcagagaggtgcaacagtaatacagagcgttcattgaaatgccaagtgtcactagtttggcatttaattatctgacttgctggcagttggaagtagagaagtggggaggggagcgattgggagggaagcaggcaggcaggaggagccagtgacagcagcagaggtgggggtgagtagaatagagagtagaacccaactgtgctctcatgaagacccaggagctacagtactttctcaacatatctttaagaaatacctgccttgtacataaagtacagtagctgtgctttctgagaagaaatcttgattgcagtgtcttctggtttttagagttgtccctttgtgcatgcagagaaacaccagggaacatcaccttgggtttatgtgtagcatgggctgcactgccagagtcgtctaaactcagagctagatcacatgggaaggaaactcaggcagtactaatgcttcgaagctccaccaaattggaatcagaactggtcagtggctgccagggatcttacctctcatggggatgaagagatgtgggttctagaggtgtaagcaaagaattctagattggccactcacctgtcatgtgctggctggtatactagttcttctgatacttccttcctaccagtagcttttgtttcttgggggattaggcttttgttttttttaaagattttatttatttattatgtatacaacattctgcttccatgtatatctgcacatcagaagagggcaccagatctcataacggatggttgtgagccaccatgtggttgctgggaattgaactcaggacctctggaagagcagtcggtgctctttacctctgagccatctctccagccctgggatttggctttcttaaagtcactttattgcttagcattcacgaggcccaggctgcaatcactgcacctgggtggggggaaagccactgtattttgtgcctagcacaatgcaatatacatgagggtcatatttccaaatctcattgtttaaagcagcaggcaccttttattaagtaacatattatttagagaattgtgaaaccaataaaaagaatccagccatttgaatgattgctggcctgacctaactctctagatgccaaccaaattcttctcatgtccaagagacatcccgacactccttgtgcccatccattcttgctctgccttcatagtccaccacagtgtatggtgacatgttcatctattggccttctgttccccactggaatgcttgccacaccagagtaaaaagcaatctgtggtgtcctgtgctatatcccatgtgttgtcaacaagatcatccaggagttttcaaagtaggtggtcagtgtgaggaagattgaaattatgtgatttaagaggaaaatgctggaactggagatgattacgttaaatgagctgggctcacaaagataagtatctcctatttttctctcttacgtggagaaggacatagaagtaaatgggtagctgcaaagaatattgtagagttaaggggagaatggggaaatgataaagaagggtgatgggggaataaaataatcaaaatacatggtacacattataataataaagtgttttactctgttacaattaacttatgctaattaaaataaagtattgcttaatgatatcattgctaattagtggcacacaagtaataactcataactgatggatacaggtcctactctgacagccctgtggtgcggaaagaaggtaactgggcattcttcaatatgtgtgatagggaggtattgagctagggaagcatggagtgttttgggaaaacaaagtcccaagaggagctaggagggtttctggaagagatgcttaaaacacttatcagatacatagagggttagttactgctgcaatgacaaggagtcagaaaagtggcagagttggtatggaacaagcatgtgggcctcggtctccactccagaacagaataacaggcaggtcaggtacagagcatgttcacaatgttctgcaaagtgcaaaagagcattaccgaggaagtggagatgaaacgggagattgacaaagtgctctgaaagtgctagtggaagattccaggtgtctgtcaggatcacatccaagagacgatggctctaatctctcatcccatgcccaggcattgaaacactcgtcatatatatatatatatatatataaataaaatgtcttttcttcagacacagatgctttgatccaggagttccaactcagcatctaccctaagatggtttattataataataagattgagtatatgtatatgtatagtatatggtagattaacctatttacatgtaacatattacaaaatagtttgaggttacctaaatctagagttgaatgagtaaataatttatgaattatccatacaatgaaatatcacttaattgttatgatagctctgaaataacatttatttgtgtgatattataataaccgcagatcatcaaatgccaattttttgcacagcttcagggattgacctgacttgggtgacaaggaaacaaagaaaagacagacacacagacacagaaaagctaggtatgggtggacctggctttctgatggagaagcagcagcagccaggaagcccagtcagtgtgcctgttatgtacaggtgttattgcacacagctgaacaagggggcgtgtctaactaatcttggtaggagcaatctctgtagggtcgcagtctttaaggcataaacatccagggggagaaagataagatagacattttctgtacacagtgtcaatattcacactggcaaggaaggaaggttttggggctgaggcgttgggttccttggcatggctgtacccatgtcaaacaatacacatatactcagaacttcatccactccaggcttcctttgatccccacaatggaacaaatattatataatatattatataatactataacaaatatatattatatatggcatttatttaactcttaaagaaaaatgtagtcctatgctccttatgattgtcctctgctgacaaatgtgtacaggagcagttttggctttgttggatagccttgggcatgcttgcacatagtataactcagtcacatgacaccagtgtcacatgctgctggagtattctgcacactatctttttaatttatgttgtcatgttgggtaatagaagctagtactccactaccgaacttcatacctaaccctccatatcttgttttacacaattagaacaagtacacaccacgacagtggtaaaattgcagccttgtaaatatacagagcagcatttgtcatttatcattatgatcaaatattaggccttgtacatagttgcacctctgtactttgaggactcgtaccacagttggcttcttgataccagcaattccagaaacgagaaggatgcattgaatgtactgttacactggctatgctaaggattttttacaatcttatgaaaccaccatcattgactgagcgtcattacatgacacataactatgagcacattcacggactcacatgtttccatcaaagtacagattcatgtgtttcctttcatgtaaccagcaagttcctattcatgttaaaagaatcaatgaaaatatggtgacagctccccattgccttgccctgccaagctaagatcttcagccactgcatttctttacaccaaggttacttcacactctctggaactctcaggctgagacatgttcacagttgcttgtgaacttcccgggggagtgggagggcttgagcctttctccctgcttgaagccactctccactgtgagcttttcatgagaaagccctgtttgtcagtactcagctgagacctccagttgtctctgaagtttagatccaaggaggatgcccccagcggcatcaactggccctttgctgtcatgaaatattactgttttacactcacaaataaaagttagcagcatttcattgctgtgtggtgtgaaattagacctcctaaccagctggatgcaacagcctggtgtagcaatagtgatgactgctagtgttcttggttcaattcaattaggaatagttttttttctctctctctcttctttggtgaaaggggtagtcaagatgaatgccttgcaaacttctgaaattcctacttgtataaaagaactattaaagtagagtaacatctctatgatctttgaactgagccgtcattctgccattattgatgtagctgctttaagccgtctaattaaaatcagagtgacagatttgttattgaaaatctgaagcccagctcacaagcgtgcagcacatctgagcagggtggtatatatctgctgttttgatgggttctcaaaattactaagctgtgccgggtgccaaaaggaattcaataaatcctttcttttcttcccgagcaggtctcattagtctccttaataatagcactagtggatatcaactttacttctccaaaataaattaactgtgtccattagggttgtaattacagcatcagataggagtttattctgctacaaggagagagcaacctggtagagcctagggctgtcctcttgggccttacgttttaaacacgactttgtgtgtaaaaatgggggtctgacatgggtgggaacaggtgatccagccagggcttttgtcatcccaatggcgacagtctctctccccttttggaatgctgagcatactgtatcacaggatgtgagttctgccactagtaagtgagagctggtcaccagctagcagcctgcagttcagagcctactaaacaaacccacaagctcagagtaggagaacacgacagaaggcagcattatctgaaattttagctaatttttttttcctaactagcagaagccatctgtcatggttattccgatcccaaggctaaattgaacggaaggcattgctgggcaattaaacaagttctttcaaaatattttcctacctttctgtcttgtcaggagagagttggttgtttggtttggggggaagagattatggttttgttttttgttgatttgtttttatatttctggaaagtttttgtcctccactccttagagaaactttcttacatttttgatacaagagaatggaatgaaatgtcattaaagggatgtgtagtgtttggagttgattctggtcttctggctcgtacggtcttaccatgtaattctaacatgtggtggagttaatttcaacgaatccacaagagatgtccatagagatagttagaagggaaggattaagcagtccccttcttccccacatttatcaaagactccactgaacagaaagagagcaagccatggggcagaggaccatactacacagcaagcatctgcctcccttttcctctcactaattgattttccacttcctcttccagttgggaaggaaagttaattctgtgacttacgatatcatatggagtagcacacttttgggactcaggcctctgggttcataccatgtttgagaagatatttctagaattgaatacatgggctgggggaacattctgcaccttctctctcttaacttcattattcaaggcggtggcgggggtgggggggagtgaggggggatccttgtttctgcaaaggcgaccgagtgtcatttcctgttaaatagtatgaaacatatgggggcaggattgcattcatcacagattgtcaaaatattttttaaggaacccaaatcttctagggatggttccaagtgtgcctggtttccctgagcagtgaacagcatgacctttacattagcagatatatttataaatacacatatggcctgtcaagacctgattggctattgagctgatgaggcagcaacagcattctggtgtttcacctacgtggagtttagtatacatgcatatataataactaatttaccttagcagttttcacttacagtaacctaatatagctatgtgtggttgacaggggtaattttttagtgagggctgtgaaagtggttttagatatgattttggggggtgggacctctatatatgttgattgctttatttttccctcaatgaatctgtgtgattactcaagatggacaataaccagtggcattaaaaaaaaaaaacaaaacttttaagcatttgtggattctagcctgttttaggcatcatattggagagtttaagaaacagtcacttgtgaaatgcttttaacttccctgagaaagacagacagacagacagacagagatggggagacaaagagacagactatgtaaacaaagctgagtaccctacctagaggtggacaaggctttaaggctttaggaagtatgttccagaaagtcagttgccaccacccctccctgccatatttcttcagattacagaattctactcttgtagaattgactcccagcagtcagtgtaaggattggtagttcaacaacactgaacagaatttctcagtccttagaatgcttatgcctgaatcctttgggcacatgagcagctcaaatcctcagtcctcttgcctgctcccgtgccccctgggattcttatttgttgttcactgccctctacttccccattgagcgtctccttggctgctccttcagagtgggcttatctttatcagcccagaaggttttatagagccagactcaccaaggtttgtgttacagaaaagagagctagttctctgtattcgaaatataagattataatgtttaatgccgcttttcaaaatactctgcagctctaggacttcctaatcttcccaagccccactgagaatttctgattctggaagctcctctgccacctcatccattgaccacattccccacattctccgtggcaccgtcacattttccagcttcatcacctgtccctttccttgctctgtcttggttttaatgtcaacctttctggagccctttgaaccctgactgtttattccctttcctctagttgttggcatggaaggacacagcccactcctctgaataaaaagtgaaattgcctgagataaggacatgcctatgtatttcagttcatttctttttcagcttcctagacagtgaaatcctggattttaatattttctaggcacacacacaaacacacttcataagagggctgttcttatacactgttaatatatttattgtttatatattaatagtttcatatatagtttcattgtaacagctccgtgtcactgcctttgccctctgaatttgtgcatgattggtttttctgagtgtgcaaaggatattgatggacttagaaactagcacagacacctgtatgtgtttataagatatagttaatcctccattcaggctcaactgcattaaaattactgagcaattgagagtttatataggatggagatgctttttagaccatagttctttctgtgtacagatgagggactctagcagcttaatgaaagacatccctcaactgttacctggaccacagagcatggttctgtaccggaaatttaagtataaaagatgaagaaacagcacgggaaagcatactcgcttcacattcatggaatttgtcatttttcagtagaatccattgactaatttattgaaatccaattcctgacctgccaatgtatgtaattcataaaattttcatgttgggaaaggggaaaaaaaggtgtaaatccagaacttctacttcgttctcaagtgtggcaagggaggtcttgaagagctttacacatctcatttgcaaaataaagtggaaatgagtgagaatttgtaccatatgtccacttatttttcatttttagaggaatcaagtaattgagatcataaattattgattgtgtgagaatttccttttcagaaattgcatacaaatctgtgaggtttacaataggctacaatgaaacccatgtttagttttcagtgacacaggtagtaactatgtttacaaaaataaaatactgaaaatttcctatcttcctatttttatttatgtgacttcaaatggtgtatagttttcaaactcactctctataagtgttttttaatttgttttttttttttatgagttaagccattgtcttgtcttatcagatggaaagtggttagtgtttccctatgggtaggaaggtctgagttgagctgccaagtttcttcacttggagaagaatagtattagttactaagtcatggtgtcatattctggaagtagtgagcacttaaacacttctcctccaccctccatttcagacatcaccaccaccaccaccaccaccaccaccaccaccaccatcatcattattattattattattattatcattattttcatcatcattattcttcttggaagaccagagtcatgtagcaaggtgaattcatgcagtttgcacttgaaacctactttgaaacttacagttgttttgggaaatatttgtgtgttgtccagtgcccccagtggccagcctctcataagagactcacttggcaaatagaagcttagaacaaagtgtgttgtctggactgaggatcttctactattgagttgacttctgtttctgcccctacaaacatccctctcctccacattgtgagaagggttttactctcagcacagagcactattgatgggtggagaccgccctgtgtaacaaaggatgttcagcacattgctggcctggtacctgctcattggtagtagttctacctccagtacacagtcatgctcagttgtgacagtcaaatatgtttccagacactattgaagtctcctggggagagggagggacagggtcaccttggtttggagtcattgcttagatagatatttcaaactgattctctcttatcgaagaatgttacaaggggtaactgttgaattcttaggttgaaaagaaggtctccccagatcatagatctgcttgcctagatgaaataaaacaaaaagattacattttggattctattccatacatgacaggttttttttttattttaaagaatcaattatcttctcacaattcgaagctgttaagattaaattaccttggagttcttctttacagcattaggaaatgagcatcttaatcctaatcctcaccagcattgctgagacaggcacagacccttctgggttaaagagtagacctatgatcatgcaggccaataaaccacctctaggcattgtttccccattaccgtattgtcagccttttgcatttaggcagaaatgaaaaactgcaacaaaatttccgacttcctgattctgtgtgaatgctgggtttattattcatttgcaatacaaagcagctgtgtaattccacatgagatattctgtgtgtggtgcctagcatttacccatcaaggtaccaaattatccctgaatctatttgaagttcattacccagcttcctcaactgaaaaatacactgtgaaaatgagtctttttagttttattcactttctgggcagtggggctgaactgcctaaatttctagtccttaggtgactctgaacttgaccacttgggatcctaggttggcctgagattcagaaacaagagatccggattatttttattttttacatctaatgcttttgagacaaagtttcactatgtagctctggctggcctgggactcactatgtaggccatatgctggcctggaactcacagagattttatctgcctctgcctctgcctcccaagttctggtattaaatgcacacacaaaatacatagaaaactgagtgtttcagtcctgtgtcttactgggaacagtagctttctagaagaatctaacagctgttctgggattttggagaccacagtacaggaaaagtggccatccattatcagagacagtgttgttacaatcctgagacttgcacttcccaagaactagtcctgactactgcccatcatttaatgaaatcagtcaagtgttgtgtatctggtctatgaaagatgagaagatcatctcccatgggttagagacgaagttctgttttccagctttgtccccaggctccttcttccctgcctgccaagtccaaccatggaagatcagctcacctttgagctcctgcagtactagctaaatgtgaattctaagcaccctcttgttcagggtgagaacaagggtgaaaaagagatggctgtttcaacctgaatcttcactttgtgctgacaaattaatcatctgttttaccctctctgaacaacgagtctccttgtcaagtttgccagatcatatgcatttcattacatggcatcttgatgacaaaggaaatctaggggtgaaagtgaacctagagatgactcaagagtttggcttcctttctgtgactcaagcatggaagagtcattggtcctgaatggaggcactctgtgacaccatagagaagcagccacacctgtggatggagctgaacaatttttccagtggatggtttgcctctagactctgtggagttatgtttaaatttgttctcttgttcatatttaaatttcatccagacagcccagtcagaatctccatggatggaataactgtctaaatacaccaaatataattgctaattcagactttctccccctggaactaaaggttgaatttcttttagaactaatgatgaaacatttcaatttcttgatctgtcctggttagcaaagtgtctccaatttgcaataattaactgagttgccctctatcatttgtctgatttcctggattttaatactcatttgaaaagatttattttcaaaggaataatattgaaatggaaaagaatgacaaaactttgtaacgcagaaaaaacttagtgaagaaaagtagagtcacagagccttgttgagctttcaaatggcatttgcatattttaatcatacatctttgcagtctccttatttcagctaagcatgagtaaaagtggcctgtctcacagattcttattttttcataagtgcaataattatttagtgatatcaaacattcagtctcctttttaaaaacaccctttgttgctttgccgatagattttgtcttatttaaagtgcattgggtcttgagacaacactgctggacctgccttatcagcatgacatgtactatatctcactgccccattcagctagaacagtttggaagccgataaaagcgagccttcatcctatgctctctgcggttcctgctacatgatagagtcgtgttgctgaagtcctcgtccccttgctagcagaaggggatttgaaagccaatttcaagacctcttaagttataacccagacagaccgagaatccacctcatattttaggatgcacgaatttagatttatggtgaggaggcagggataatgaggataatctgagttaatggaaaatggaaaatacaattatagttttaaaagatataaattataggtttgttttttcaaacagccaaggattattcgctttccacaatatacaaagcattgtcctcaccccccttacccccatccagctctcacttaaaatagcaagtgttaagagatctgcggatgctatctgtacattctttgtggttgtagacacatataagcatacacagaaaagatttttgctgcagaagttgtaatcagactactcatatttctcactacattgtttttctcttttgcagcatagtgtgcatagctttttaggtcaggtcatgtagctctaacatagactccccccccctttttttctttttgagttttaatttttttttagcttcccatacaagagtaactgcatttacagcatttctactcccctgtctcccatctccaactcttcttgtttcctgtttccaccccaccatcatttcttaaatccatgatatatacgtgcatgtatacatatatgtcctgttgaatccatttagtgttgctcctgtgtatatgtgatcaggggattggataacggaagactgattctctttcttaacagccattgatggcctgtagctctttatgaatgggtggagccttgtgagtttgccgtgttagaatgtcaactgttgttgttcttgtataggtcttggttaagcaaacatattgttgagatttcatggggatgctccaagacactgtcttcctgattctttgtctctttcaacctttctacctcctcttcctccatgttgtctgagccctaggtgtagatggcttacattgtagattcatcagttgggattggtcaccaccgggtcagttgttttctctacagttgctaatttctgtaattgtctctgctgctgcaaaaagaagcttgttggatgaagggtgagagccatacataatctgtgggtatatgcataaatatgtagaaggcagttagtagcagccactggtaagtttagaaccatgcatgaattctctcctgttgagcaggcattaaaaagctagaaagctgttggttaacccaacatagaagtgccactattgaacttccagatagcttgctgagctgctctttcttagtggttcatagactttatagctgggtgggactgtttgttgcttatctccctaggcaactttgttagcacctttgaatatgatgagacctagaccttaaggcttccagccagttccagctcagttccttcaggtctttggtctgaagttcatgatgtcctcagcaaccgggtcttaccttcaagttctgagaggcatccatgagcaacagactataggtttgctcttgtgcttgatcaagtagtactccaaatgtcaggggcttttattattgtatttgatttttttgtttgttgtttgtcttggttttattgtttgagttttgtcccccccccaaaaaaaaaggtagatcagagagtgtctgtggttgaaggcagaagcaaagactttctgtaaacaagcacaagggctttcactggggggagtaacagtattctcaattgaattatggttagtaaatttagttagtaaatactaaaagttactggatttcactttcaaatcagatagatttttacagtatataaatcacaccatgcccatgttgcctagactggtaaaattttgaagcagttcgtgtgacttttttttatatatatatcatcaattagcatcatctttgaaaaggctttgcttcagtgaagtcagtttcagcccaccaacacctgtttgatttattacagtcttagcattcttggaatttgttcaataaatattttctggatttaattttataagcctttcttggctcctgccaattccaacagtcatttctcagagtgcatccaaggaagccattaggcaatcgtgatagattttgccaaccctgttcggttgttcattgactaacaaagcactcagtgtattccaggttgtgctctgttcattgtagacagatcagcatcttggaaaagggaagactcctgccctcatcaagcttaaagtctaaggaataagataggatttttattccacagagtcacagttagcattggttgtcagctgacccacctaaggagaaacttcagttctaaattgtgttcagccaagatgggcttgtgggcacatctatagggcttgttattccttgataactggtggggtccctgccctggtttcccttcattgtggactgtgacttacaggatgtgagaaacctttaactcccagtttggttttgttgactgactattttaccctataaacagagagcaaactacagcagtgagattttctgttaaaatacaaatgcatgtttgggaggactggcttctggtgaggctaatgttccccattgaggaatttgaccttgttatgaaccgatagatcatggcagccacagggttgtaacacacgatgttcacatgctcagtggctaccattacacgaccactgattaagtgaagatgtttttcatacattttgattttctaactccctccatatcctgagatctaaaagaacagtacagatggagaagcaggactcagtaccaggagctcttaaccatcaccttgtccatctggtggaagatggacacatttcccaggctaaagctaggggcatggcatgttttgaagcaagagcatttcctggtggcccctcccactggctttcctttcccatccacattttcagtactgcgacagaaagtgtaaaactttctgaaaaccctgatgcatctcctgtgttgaaggtaaagacatgaggtgtgtcttagagaacttgagggactctagcattatcagtaaagagttggggcaatggcagctaatatctttttttttttttggcatgcctcccaaaaacacaatagaaacctcaacacaggtttattatttttattggcaagtgtgaaacttgtgggaggaggggtccacagagacacagttgctctttagcagagctgtgttatttctatttaacttcagggaggcagcaagactctaatctgttccttgaaggctatgtcttaattcagtaggactttttcaggtgcctttactgtatataactttaaagtcaacaaagcactacagtgtccctaggaagtagtgtctcaccttacagcctccaggacattgaaatactgtggctttgacattgtctgttctaagtcatttcacctagtggtttttgtgatgacagcctatgaaatgagtcccttctcaactcttgttctttttcagtattccatcatgaacagtcaggtttgttctagacacaggaagtattagaaacatagacacgtcatctggtggagaatacttgagccttgttatatgcctgataatatttttggctactcatttcagaacatcccacttaattacatgtagtaactaaagtacagagtgcttgattgaattcccaggaaattagaaaaagaaaattggaggcaataagtagaattatcttcatatattacccccttttttggtgatggtagtctgcgtgtgtatgggttggggagtcagttcttgaccttttgtcaatgcagtgcaaagaaaatgtaattaatgcaagcgtgttttgtatgcccagtaatggatttttccattgaaacataacctttataagatgcttccgttattactggctgtcaggtgaaaattaaatgagctcactctgagcttcagatttatctttctgtctacaaaaggctatgtgagaggctgaggagatacatagcatttactgatgattccctaaatcagtaccatcaatctatggtaatcataatgcaccctttccatagagctaatggtaggctagcctggatactttgcctcccagcatgtgccatgtatctacttggagagtatatgcagctgttaggaacttctgcccttcagtgtgctggctgttgcttatgcaaagtgtgcctgacagtctgaagcaacctagtcaccttcatagattgaagaaaacttccaatttactgacaggatgtaagtgccccatttgtagcaactccctggcaatccagttcagaaataatgctacaaactgacttaaggcctttgcttgcattgtctacaaaggacttgtcccttttatacgtcatagactgggaacctttgttgttactgtattgtgtgtggttgttactgtgagtcatgacccaactccagcttcacagtaagatcatcagtttcattggtgaggacatccaacacccccccccccccccagacacacacacactcttagagctaagcagcctagtgttaatgtgctaactccaaagtgtctgtagatattaaaccttgggttgagcaggaagctgtggtagttcagctattaatgttcctcttgtctgatatcagggctagagtggggccctatgagcacagagctgacctgactcccccagtttcactgacagcttggagatgggaacccttttggctaagtacccagacatcttcagttttctctgatcactcagacttcacggggctgcagaatctgaccccatatggaaacaggtagcccactcccaccaccaccaatagagctgcccttggggagtagtcctctcatcataccccagccttctctcactgtaagttgttgttttttgttttgttttcttttctgagctctctaagtacagatgtgttaacatgtcaaattaatgaaaaacaaagtcagacattccagaacctgcaaagagagttcaattccagaaatgagcaaaggtttgggaagagccttttttttttcttgtgaggtttattcatcctccatagacacaaaaataagtctttcaaagaacatgcatatttgaggcacttggcagtgtgctgtccctggcaacttctcccttatttataccacgtaattatacttgcttttatatgtgtgtccttttcattattgagtcgaaaacggtcttttgtcacattccagttattgattagcactggcaactctgaaatgtggcttttttagccatcaataaatctctttttcccccttcttaaattataacagatcttgttggacatttggggagaaaacaacttaaaattcacaaccagatcttggctgccagttcgggacattgttactctgtgccttgccaagctttccacttactcgtcattgaaagttcagggcttgggggtgggatccccattgccagagagaaaaccaagtgacatcattagaattcagccatatctgtgcctccaaaggcatgctggcttcccctcccccacctttgtcatctcccctctgtgctgatccccagctgtcctgtaatctcttctcagatgaggaacaaactcaaaactgctcagaggcatgacatcagtgaccaactatgagcttacagatttgtttatataaatgtaagtaaacagctaaagcctgggtctttctaaagcaatccaaaccctgtggccacttacccaccaacagtgttaatttccattagaggactgttaagattgctgaagtagagtctagtgaggcatgatggcaggtttccgttctttacaaaagtgatcattgtcttggatctgtattgccaccaagaaaatgtagttggagtccaatactttaacgtttctaatatattttgaaataaaaagatgaacattctttgattaatgcactttcttcttccttgtttctaacaagatgccttgcaaacataattcatttttttaatcacagcaagttttactagttcatatgtatcaaatggaaccttggatcctgaagaagctactgcagcttttcataatatctgaatatctggcagtcactaaagtccccatagttttggaagtcatagtcctgttccctgctttgcctgcttatgcagtcttgtgtgtagtctccctgaatctgccaactcgagcaaatggtgggtaactctgctcaacatgggcgagcccacaaaggaaggcttcagagtgggacgctgtttcctcagagcagtgttccttcttccttttgcatgttggcaacctagaccttggaatatttttgcatttacaatcaagaaactttcaaagaatgttattctgactggcttattaaggacccatgatttatggcatgtttaattccacctgacttccattgggtggttgcatggagagatggtgtaatatattcagattttgtcatagttggagaatagcatatttttgtcacatatcaggttcagtcctgtattccaggcgtttattcattttacatgtttatttcttttgtaacagcaaagtgattagtacatgggctttgtgacccatgtcacttaagggatactgtttccacgtcttctgggggcacagggccactatcagctctacagcgagagcagagcaggtcccgacaagccatttactgtcttgaaatgcaagagtctatttagggtgatccttgtgctgctgtcagagcaatgagggtcagcagttgtggtgacaaattagttttgacaagcttaatgacccccaaaaagaaaagtctgtggctctgatagcaactggggaataattggtaagctcagccaaatggggaatgtgttaaactttcccaattctctatggcaggccaattataccattcagcaaagagatggaagctgccatccgcttctttagcttacaaaaaacatcagcaggcaatatttcaatcagttgaatttggtttggcgggacatcaggacattgaaagaaacaactggatctttcaaactatgttcctatgaaaaacttggacaaagaacaaaatgacaatttctgggaggctccagtggacagcgctcagctcactattggcaaattcctctctcataccataggccagttttacctcatatgcccagggtggttaagtcctaaaaccaagtgcacctcgttagagtgggtggtaagtaaatgattatccattactaacccaccaaaacacagcattgccattactttattttggactgactaagtgtcagcaccagtgtgagtatcaggcaataagcggatgcctgccagcccaaaggctatttctagtgtctcagcagtgtgggattcctctgaagacagtgggggaaagatctgtcccttgctaccttctggttcatgcagacagaggtcttcctatcatatatgcacagtgttacatattttcacaccatcgttcctctgtgtgggttctcacccttcctaatgtcatgaccctctaatataactcctcatgttgtggtgacctccaaccataaaattatttcattgctacttcataactgtaattttgctagtgttatgaatcataatgtaaatatttgatatgccacccccaaagaggttgtgagcgcaggttgagaaccaatgtccttaaggatcctctccctcgtctcacacagtcaccataaatattgtatgaagacccatcctaatggccttgcttcaacctaatgtcctctttacaagctctgactccaaataaagttgtagtctgaaatgcttggggtgggatttcaggctatggatttcacaaggtcataatttgtctcatagcaacagtcaaaccatcttaaagaaggtcaccagagaagccttggaaggagtgactagggagtcaagacccaaggaaagacactctgaagagaatagggggcagcatgtttgatcctgggacagacgtgtaaacaattctgagacggtgagaatattctgtgtgtgtaagagaaaaggcaagaccagatcgtgtcagtgttgtcagcaaactatgcagaaaactttggattttaatctgagcatctcacttaagtgcagaggatcatccaagacacccagagggctcttgtgcagcatcttacatttactttttcttttcatatgaagtccaacactttcatgcttttccttagaggaaacagctacttccagggcgtgtgatgggtgtaccccaatgttcttgcccattagggtcataagtaaaacagatttatatcattacaaacactgttgcatctagctggccaggttaaagagagctactaagttactaaagatggtgcagtttacagcatagattactggttgacagctgatgtcctaggatggccaaaaagaaactatgagaggtttcatcatatatgcagactggtagcctgtttgaaatatatgaattgtatctgcaataagctaaaacatttcagaccacaggacctgaaaaggtgcaagtgaagccatgtgtgttgggaaatagaagtgttcattgtactacaagaagccagggaaaacattttttttttttatttgaattacaaacaagattgaattccatgacagtcccagttcccttctcccttccttcctcccctactgcccccccccaactaaaaccctacctatcacatatcctttcttctaatctacacctgactcaacctttctgctcagggaaaacattttattcagaggagttatatgttctggtttcaattttaaagctggtttactacttgcaaggtgctgcaacaaaataccctagactgagtggctcataaaaaacagagatttacatattcctcattttaactattggggtatcaaaactaaactacaatggaattcagtgtctggtgagggctgctgcctgccactgccttcttcctttgtctttgtggataagggaccaacaaggcctctagatttcttttagcacctgccaggcacactttgttcctagttatactttagtacccatttccagatttacttcttacgtggtgtcataacagaatcacacagtcctggaatgataaccacattccagagttacacagtcctttattttattttacatcatactgtattgagtttcttggcatattctagacaagcttcctgaaggcagggcctctatcccattcatctgcatttgctgagatacccagccctctcccctccctgcaaagcccaattcatgtttgttaagtgaaggactaaatgaagttttaagacaggaccttgaactcaaaagagaagcctattaagaacctcggtgattatgaagagtcgagctcaaagaatgagagtctttgagacatcagtctcactccagtcccagctagccctgcctccaggcatcactagttgccctccttcagtctgcatgccctgcctaagaagaggagcctacatgattcataactttgaaaacaacagcttaggaactttcatgaatatatctgattccatgatctagcatatactatcaatttaataaaatgacccttcctccctgttcatacctcgatattaacacatggggtgggcacatgaacattcatgaagaatctcaactgatcagttgttcacttaagagctgggcagttgcatggcagacatttacctcgggggtatgtttccaggtagctgagaggatgggtggcaatattgtgacactgtggtggaagatgggaggaatcgtggctttctggtaccagtcagagcttcttaaggagctttaggattcccaacattggctgcgcagacttcccgtgttgcagatctgactcattagctgccataatccctttgtttgggaccttttccctcacttgcaagaggcttcctaattaggaccaagggtatcccatgcagaacaatcgtgcagtctcccatcgtctattgtgtgagtttttgtatggacttgtatatatgacataaatgcttaatttttatgacaaaagaaaaaaatagaaattctttcccttgtgcttctgagctaggtctggaatgaaaattaagaaaacctcaccgaaacggtgctaagggttttggtttcttcttctttttttttccttccagattcctggtatacagaggatatgtagactactagcagtgttttatatatggcttctatttaagtcccctgttctgtagtgctgctgccagggcgaggatctcattttcaatgtcagtgttgtcctggtggtgtatccttggggctgcttgtaagtctcttggctgacttgtctgcaatatgcaaatcccttctcctggttcatcttgcaattccctgtagtttgagtctttgttctcctgcacatacagcctccctgcctgccttatcctccacacctcaaaagcaacttttaaaatcttctgttttaatgcactaattttaaaggtgaaagcaaagacattaattggctacgcagccaagctagggaagtgatattcaatccaaatacattgattactacataaacaagaacaggtttaatgtgtaggcagtgtaaaacactctgagaaagggctctaagccctcgcctgatgattattttatcctgtttttccattcgagacccctaggccacaccttcaaagaaggagcagatgcacagatacaggctactttgagatgctctccttattccctggcgctgtgggagtcagagagcttaggtacctagggaagctcttcaggctcatcccactgctctgccccgctgggagttgcaggcaaggtcttaaggacgaagttctgccaggcttgccagggaaggtgtggggcttaatcagctcctcactgcaagatgtgtggttcccgatgctgctggtgttcctgaacacagacattcaaaccttctctttgcagggagctcatatgtttccctgaagttgcaagaggcaaagccaaataaagactgcatagcctgagtcccagcttgggcccttgtctggtggccagggctgttctgtaatagaattactgtttaggaattttgcagagttggctcaaggccgaagatacttgggtaatgaaaagagggaaaaatgtaagtgggccatgggagcaagccggaaaaacaccctccatgcaatgtcttcaggttcgccctaaagcaaggagttggatcatgcatagtgttaggcggagaacccaagtgaatgtctccaagcccgtaggctttctgggaacggcctttatttgacaggccaaaaatattctgctggagggctggttttccacagaattagacagagggcctcaaagccggttcatggtgatctgcaggcttccagccaggacattctgttgatctggataccatctatagcctcaaatccatggtgcttgcttgtaacattttaatagccagcctggattttttggcagacatttgtttagtttatttttctgtaagcttgcgacttaaggaattgaaatttgagagtattattgtgtcttggaactcagaatcagaaatgctattggagatgattttttttttctccttcttctcaactggtaccctgaagagaggagtttcacatttataagtgaccacggggtgatgtaactagaaaaagttgttttcgtggaggatgtaagcaggtggtttagatagagttaaagaagccctgccttccttttgctttctttaatcgtatttccttcttcccctttccttctcctctcttccccaatcctctttgatcacctctcctttcttcgtggtgagaaatgctcagggagggataggtacctgactgtggtaaggtcctggtcccttgtatatacctcactcaatacctctccactcacccagttttcccacctctgcctttaaagggagacttctctttgctgagtgtgatagcacccttctcctctgggttcaccctcttcctgctgtgacctcccgaagtaagcagtaagatttctgcagagcttaatatgttactcacctaccaggtgaatgctgtgggctcaaatcatgaattactattttttcccctgtggcttttgggtccctaaaatctaggaggagaaaaacaaaacaaaacaaaaaaaaaaaacctcatctgtcattttagtatctttttttttttttttcttgacttttcacagcctgatttaggtaagagtctattctacaatcctggaaacatcttggatatttcctgatctttcatccaatgccaaccctaactactgctcacaacccccttttcatgggtatgatgctttcatattgataagtagcacggcttatttctttgggcttcatgacagcctctgatgcaggccattcttggccccaaagatcgcttttttttcctgccccaggacacctccctcttgtctttggaattcaggttcaaggttgttgcatttgttttttttttttttttctcagtgcataaggactcagttggaacttgaattgtccctctctttcctagaatggcctacaactctcagtgtgacacctgctcaataagctaagcctgaaggcacatgctctggagcacagtgacagcgactcagggtgaaaggccttggctctttctcatcatcctccctgcctgaaagacaatccccagtagcatccaggctctcttggggtgacactgttactcacttcagccctgagtgctctctctccaccctgttgtttcgttcctgatttttcttgctgttgcagaacttgtgtgtgccaggtgggccctttggggcatccaagtccctcttatttacttattttacacactggcgtattccctgtgcaccgttgtctgaattgtcatgcgttttggactcagttccagattgtcaaaggcatgttttcagctgaacaaatgaaaagaatgaaaacagcttcagccactctttgctttattctcattccccatcccagcagggaggatggggaaagaatgcatcctccaggtcccgaaagaattcctaatattcgtcctttctccataagttacacagcttaatccttgctttagacatttttctttctttctccccctctccttctaaataaactgggcctaattggaaaaagctgagagagctaagcaggaaagaatagaaaacatttactgagcttggaggtgcatattgaatgctgcaggaaatttgcatatggattacttggtagaaaaaaaaaagaaagaaacattctcagcccattagttactatgatggactcccactgactgaagtccaagcactttgccttgttttctccagctgttcttttcttcaatcatttctctttggccacagggcagctattctgttgctgctctgggtactgaggaaaagacaaaataaggaatgcaactgtgcctgcagcatgtgtaggctacttttgctttaacctgtattgtacccttatttctgagagcatttcttactcagcccagacatttccaagccactttttctatatttgcaggtgtaagtgccaaggcatagatccctccatggtgcctcagtttccctaagtgcaaaatgggaagttgggcttaggagcagtttaactggagatggaaaagagtcaatgaatatttataaaagtaaattcagtccctggaatataagattccacagaaattcaaagcataattaaggtaaagagaacagattagtgttaaatatatgtgtgaaacacattttacatttccttccaacaaaggctgaatttcatttactccaagtgagggggagaagaggggaggaaagtggtattgtgaattaggcttctaaatttgggttttgatatgttgattagtgtactatagacataaagcaacatgttgacatttctcagcaagtatgtgtgtgtctgtgtggggtaaaagatggacatatataataagcaaatgcaattaccattggcagtactcctccaggggagccaacagaaagaagtagaggaagaattgtcatcaaaaaagatactttaagctacttttttaatccatgaaaacatcattgaacatggaatgaccacctttttgcattgcaggttgaggtgagatcctttatatgaaaagatgttagatatgcctacagaaatcatctgtatagttgtgtcattgctttgggaagcaacagaagctatctctttacaaaggcatcactgaattattaagaggtgtggaaatcaatataaagatccaaaatcagtattgacccacccatttcaagctatccatggtggcttttgaaaacaaagatctgtgagattgtgtcaacataaaaggggaaaagctcttataaagaaaaaaaatctgtgctcgcttcggcagcacacatactaaaattggaacgatatagagattattagcatggcccctgcgcaaagatgacacgcaaattcatgaagctttccatattttttgttgttgttgttttgtttttgttttttttttttaaatggagtgtgctggatgtctctacaattttgttgaaatgactgcagaacctggaaaagctgttgcttctattgatgcataacatattgccattattgctctctctctctctctctctctctatatatatatatatatatatatatatatatatatatatatatatgctaattgaaactcaaatatgtgatgaatccaaggtgtttcagtgagtgctcacctgtgcatgcaaatttgatttcatctttagtaagtagtaaagttatatgctttccaaaaaaaaaaaattaagtgacacactggaagacaaatgtcacacaatttcaagtgtatgtgtaacctagaaatgatgaacttatgggaacagagagcagaattgtggctattaggcttcaatgtgggacttttaacaatggggaaatgattggtttaaggatataaaactacagttggacaagaggcatggactctgtgaagtcttgaggtctactgagagcatgataaatatggttgataacaatttgctatattttagaagttgtgagatagtatactttaagtgttctcaaaacaaaaatgatgaatatgtgtattgtgtatcataattgtgcatgactttatgagctaaataaatgaatgaaaataaataaataaataaaaagaaaaaaatccatatcataaagccccatgtgccaaacacgcactgatttttcaacagaaatatagtcattacacattcccaaaaggtaccccttccaacctaaatccaagtagttttcctggtcaaggttccttttggagcaactaaatccctatctttagagtaattaggacatagataaaccatgcagtgagaggtagtgttcatcagagaattgtgtagttgagatcactgagtcccagagacaacgaaggaatgatgaacctctctgtccccagctaagattatctgaaccagaaaccacttaggcacaatcacaatgtaatttttttaatgcaaagtgtctgagctatgttcaggtcacatcccctgggacctcacttttacacactgtggcctgagaacaggtgtcattagcatatttgggaaggctctagagatgtgaactccaagcctcacctagaattgctgaatcagagcaagagacttagggaactaaaagtccagccattgcccctggatactacttggagcactattgtttcagttctgtgggccatctccacaccatgatggctgcataaagggttagccgttgatttgtgattactaaatatatgatgagtcagagaccagttttgtcatttggacagtcttgacccattgctctccatccatcacggattttgtaaatgttttatgcattatatgcctggcagattccatagtaggttctagaaacaagagtaaatgttacagattcagaattcagcccttcagtacatggttaggaaggaagagtagcagcagagaaagtgcactcagcagactgagccttgtctagaactctggtcagtgtgtcagtgtcccctccatcccccagcccaatctgttcttgggaggctcctggttcatgtgggcacaggtacacagaaaagctgtgagttcctctgctatttcccagtaggaagggcccaaacatggtaataattcctcccctaatgaacacatttaaatgaacacatgattttgttggggggctggtattaccaaaagcacaaagggtttactcctagtcgaaaaacaacagcatgggcccagagagtatattgccaagagcatcagattgttattctccaggtttctgtggtttgggtggacctgtggctaggcagcctctgagtctccctttcctcatcctattgtcttcacatctgtcagattgacagctggtcttcagtagcatccctatccagaaaaggccagggtgggttcaggtttcttagcttgtaggttctggctcctctctttccttccttccctttttcctgtagagagtgccttcccatctcagtcatttcaagtttgaatttgatttgcatatctaagctgctaattataccaattacttgcagtgctttctaaaagacctcagaaactgacccctctcattaaagtcagtgtcagtctcccctgaagattggacctgtggaactatgttctttatctcattctaagtcttattctcatctcatcttctctgtccttctgtctatctatcatctatcctgtatctgtctattatctatcatatatctatctatctcttcatctcctcagtctctctcttcttacaaatgtaactttagaaaaacaactactggtgactggttttggtttttttagggggttctcaaatgtgcatttttctggtcttgtttgtctgtagtccagcgtacattctttaactaaacaccactcttgagagatcaaaaggagtcctccctgctttcattttgttcttggctgtagctcatggatgggtttctcattttttttctcttaatttgttaaggggaaaaaaaagctccttttcctacagaagaaacacaagtagctctgtggatcataaaggaaccattagtattcactaatacagtctgttcctaacttgctttcctgccacatcctctcagtgttatttaccgagcaactgaaataattgggctttgaatttttagatcactataaagcaagacctattgtcacttattgctgggtgtaattacaccctaagtatttattgaggctatttattcatctccctggtggataactttgtcaaaaccagttgagatatttctgtgtgtatggttggaatctagaaaaacatgcatttcatataacacttagaaattatagaggctttcacaaatagtgtttgtctctagaccttagggtctgatctttgagtcattctcatctttgattattccctattgtttgttagaacaatcactgtttgtcagaatgtgtacttattctgagtagattttaagtcctagagagaggagaggaaggagggagtggggttgggggcaggagggttaacattgcattataaatgcaataggtgctgctgcatcatgaaaaagacaaggtgatagttccatgaggagcttataagtgtgcatatgtgggtgactaaacttaactttggggacaaagaatgctttcctataaaaggagtatttcagccaagatctaaaagcatgggatttaaccagccaagtaggaggaaaccattttttcccaggaaaagaaaggaaacagtctgtgtaaatggcccaatgcaggaaagatccatggtgccatgagaagctatggctgggaaaacaagagatgtaagggttcctggagagaaataaggagtatcacgcaggatcccatgcaccatgacaaggtttaagggctctaacttcaagaaacctacggagaatctgacatagaagagaacctcattgaattttttttttaaattttcctgaaattgcttcagcagtaacctagtagataatcgagtaaatggattgaggcgacaaagagaccactgatgtagactggatagggtgggtggtagccaacctcagaatccagaagaaggcagagggtgttcatgcagtgagaaccttgaggatttgaaatgaaaggtggatgggggtgagaaagagtagccagggtgctttgctgggagtgagaactcacggtgggggcaagcccttgctgaggtttatattatgtactatggaggccttggaaaagagacattgaatagagatggtagacctggagctcatggggactgggggatagccatgaggagtaggatgctgtacacaggtgcttcttgtgcccaatggtagacatagtaacaggaactgtattcgctttttgagatgcttgctttgtctcaagtggaattagaagtactagcaaatatctaagtggagatatctgacagttaaaatgtatagagcacctaacatgtctttggctccttctagagtatgagaatgtttaaattaagtgcctttcttttctctatgtaatgtttacgctacagtgtgttggagaagtaaggtcaaattttgccactagagatgaatcagtagtaatttcaagacccctatttttatttattggttgatattttttttgcactaagtgttcatgctataagttctttcattgtttggctgaacgtaaaaccttaagtccttctagaatcatgttgattctttcatcccaggtcccactttgcgttagtttcttagcagccagtgtctctgagtggctcacagatgcacaccacatattttccccaaacttgagaactatagttagttaaaagaaagatcatgccaagaacatatggctcacggtactttctagtcgttgctgatggcttaattccgtgcttagactttggtaagagtgcttggtataatttaggagagctagtccttgggaattggaattcctaatattattcattgtgtaaagagaaaaacatgaaaaagtggagttggttattggagttcccaaatacaattgttctcatatagctctcccctccagaatttgctttccctttggagggaatagtgcagtcagaggtcatgattctacttggtgttgcactgtctaacagctggatgactttggcaagataattacttctctggcccaagtccccctgtggtggtttaaatgaaaatccaccccaaggcctacatatttgaacccttggtctctggtggtggcacagttagaaggagatggtggaactgttgggaagtgtagatttcctggaggaagtacattagtggaggcagactttgaaagtttagagctttgtctcacttccagttcactctcatttcttcctgctattgaatgggagtgtggtcagccagtttcctgtttcagccatttgttgttttgcctcctctgccattatggatgccctctttagaaccattagccaaaataagctgtctgtgctaagctatgtttttgctcatggtgttttattgcagcaacaaaaaagtaaccaacacaccccctttcttattaaataaggacaacaaatactagatagtttaggtacataatagacgatgctgccatagtatgcaacattccctgagagtgtatatgttaagtatgttcttgccaggattactggggaaaggtcacacttaagtctggcaatgagataaaataacaaaaaagatagcttgaaaacaactgattttatttcttttacctttttggagaatgagaaacaagggtggtttataagcggtgaattaccaatacataaccagataagattagggtatatttattagggatgtgccttacttcccgagcacctggccagctggcaggaaacgtagtaagcagcgcaagctgatgaagcagggaaaaagaagaagctaccatgtgtgtcccctaactcttaaatatcaccttgactgcgagtgtttgggcacacctgtatagccagccccgaggaggcatggttatggtctccctacagtggtcttcaatgaatgcagcaatcagctgcatattctcaccgaatctaaagtgttggaagtgttgggatgtgcacatctatctcagacttgacaacctggggtagtgtctcagttaacactcatggtaaatggagtcagtgtcatggggaggaaatggaagctcttttaagtgccataccagagagggttgagatccttatttttacctcagaattgcagggctcaaagtaatacctcagtcttaatagctcccaggtcatgaaaggcctgcatccatttagtgatttgttgttgttgttgtttctttgtttgtttgtttttacacatgaataaaccaaggcacatggagagaagggacaggatgtgacagcagttccctctatgacctagaaggaaaggcttcagatatagcatggagacctagagtcatttaaaatcagaaagaggtggcacagcaggggggagccatgaagaattttctgtttgtcacatgcctgtcagccaggtgtgagtggagcaactcagctttgaatggaaagagaatgggggccacacactgtgaggtaactgagtgagtggttttcatggaccagtttgatttgtcacaaggatccccagtggaactgcagggggacattacactgaggttttccctttgtcaagctaccaggaccaaggcagggttcggaggccatcctttccatgcctgcttctgctgaagtgactagttagctataggtggttgttggtgacaggaaatttccatttaagcaatacataatggaaatcgttgactttatagaaaagcaaagtcaggaaaacttccttgccaccttcttcctcccccatcatgtggtggagagtctgcatttgaaagcgaaaagacttaagacataattttttaatcccatctttcctgcccacttacatctcttccaaagctcatcagggccagatctggaatagcaagaaccattaaaaatttggcatattgcactctgttttttggaatatactcagtgtgggccaatttatggtaaattattctcttctcttcatgtgtgaatttcctctcctctcttggcaatttcctgattgcttctacacccctgcacatagatcttaaacacacacacacacacacacacacacacacacacacacacacacacacacacgagcacacatctattacagcgtctgtgtggaatatatgtgcatgtgtttccgtgtgtgccgtggctgcatccacaagtgcatatgtacatattttgcacctatgtgcctatatgataagcatattgttataacagtttgtcactggtgcttgtgttgctgaatgtatgttagcatacattctgtttgaacccgcagacagtttctcagtcaagagatgacagaattcagcaatcattttgggaaacaccatagtaaataaatatattgcttagtgctgttaaaccaagcatgccgattcttaatgaagctgaaggcaagcagggacattttcatcattacaatcaaagactattaattactgggtagccaggtctactgccaatgagaaagttggcatggaggcctgtgacaaacactgcactccgaacacagagtccccagctattatctggttaggacctgtaacctaaaatctgaacttctgtctcccatttagagaggttggctgtaggatggctgacagcagcatggcatcatgggaaattgttggacctgctcattggggattcttgactcagggcaattcagggcaaagtcctaaagttatttttcctcatgagaagctctgatgagaggctgtttcctggcatattgcagagcatattagctcagttttaaaagggcaatttaaaacagtttcttttccttcatgcatgaggaaggcacacatttatatgccttgaattattgataataacatgtttccaatgtgttagtgtatgcttagcttaaatttgggaaagggtgtggtaagaaaatagttcattgactttaccagtgctgctgaaaatttctcaaaacttcaataaaggagctaagcgcgcgcgcgcgcacacacacacacacacacacacacacacacacacacacacactcaaatagaaccatatgttgtaattagtattttctccacatgggtagatattagtttaattgaatatatattttgcagtagttctataggacattaaaatccaatatttaaaccccataaatgccttttacagcttttaaaaggttggctgtttgatgtcatcgcaagcagtaactggctctccctaattaaaaggccctaatgagttcactacacaaggaagtctaggaaatcaatatgctttcgtaccaagtgttcattctctccatttcatttaacatttatttagcaaataatgtatgatcactttgagtatatgccaagcaccatacctagtgccggcaataaaaagattagtaaggctcggtcccttgtcctcataaagctcacagccagtgtgggaaacaaacaacccaattagcgtgcctctatgtgctgctgggaataaacagggtggtgggcatgtgtgggacagatccagggtgtcctagttaaagccttgggagagcctcgcaaaggaggtggctccacactgttaccagcagagggcgctgcacaggaaaaagcaggaagcaaaaggaacttgtggcataattaggggagttcagctgggtcacactagagccagacagaggtgtggggcacagggaaaagagagaaggcctcatgacaaaatgtgaaggtttaggtctctttgctgtgtttccctccccctcttcccatctttgacctgcagtctctctagctcatgatgttttacacctttcttttcttttttcttttttctctccatttttatttaaattagaaacaagattattttgcatgtcaatcccagttccctctgcctcccctcctcccctttgcccctcccagttaacaacctacctatcccatacccttcatgattcccttatggaaaggccttccatagggggtcttcagagtctgtcatatcatttgggatagggcctaggctctcccccatgtgtctaggctcagggagtatccctccatgtggaatgggctcccaaagtctattcctatgctagggataagtactgatatattacaaaaggccccatagatttccaatacacctttcttttcattttcttactttgttctttcatctgtccctatctgtcttctcaatgttgaaaatctatttctgaggcagactttcagagaaaatacaaatttattgcctacaatacatcctcattattcacctctgatctttttgtttgtttgttttttgagacagggtttctctgtatggctttggagactatcctggaactagctcttgtagaccaggctgggattaaaggcttgcaccaccaacgcccagcctcacctctgatctttaatactcagaaaatcacataaatgtgttgaagctggctgggcttgtgccaattccatggaaaatactaggaacaccagtaaggcagggttgagcctgctgtttccctgtgccatccagaaaagctctggatgttcagaagcccagtaagggcagggccacttgaggagtggagagttggcctactggttgtttagccatattagttggtcaccattgacttttattttaaagtttaaaagcatctttcccatagggaagcaaagtgttttgactgttgcattaatttgtttggtttgtatattttcataaagccttgtgcttgcatgtagcatatggggggataggcagagtggagcctccatcgcataccaaggatcacatattcatgtatcagtacaatggcaggaaactgaatttaaagcaaacaatggtgtctgtgagtgcatggaaataaggaaaaactgggtgtttggaggttgtgtaaacattatttttgtagttttattggtatttgtgtgaacatacatcaagggtaaaaattatacctagctttgtggtacttggcaatgcctacatagaaaattaaataatttagttgcttttaaataagtttatacagaaataattacatactcatataatatatttgcatatgtatactggtatatattcaaagagcatttattgtggtcttgtcagtccctgaagaatatatgctcttaagaacagtcacagattgcatgaagtcagtgccagtaaacaacagaatctccacctgaccaggttttcattgtttacttggtcaaagaaatagtcgtttgtttgaagttgtaattttcttatattgtattgatacaacatgggaaaatatataagtgcttatatttggtgagtagctggaaagggccacatcatacatcttacatggctgtgtttcttccactttggcaggctccttttgtagctgtgaatataataatgcccgtgatgaggttccatttgaccccagttcctttcaattattataatccagacacttgataatttccataaaaattcagtgtggttcagttgttggcacaaaagtaacatatttccccccacattgtcgcatggcctctcaaggaaatcatttcctcggcttcacttcatttctttggctgcctcagttaagaataccctcttaacatcagctgctagccatggcctcaaatggtcaaaagcaatgaatcgccttaaaccaataaaaatcatacacatatacccacgtaggtgaccttcgtattatacagatttcttattaatcaaaaagcaagaagtgcaacaagccagtaaggaatttatgagctggttaatagattcatttcgcacaccagaataacaaggaaggaacaatgactggaatctagtactgtttcggaaaacattactgaatgggttttaaattaattctgcaacatttttaatagttccagaaagtctggataaatgagaaccatagaccacttaagaatgctgcatgagtgtcacacgctgaatcaggggctcactgaggccaaatgccatagctgcttttttttgtttgtttgtttgttttctgcccttagtcagacccaagagcagtcgaagggttgccatggacagccaaaagcagttctcttcagatgccaggagcctttggaagcttgaaccaagacctggttaatggtggcttttcagtgattttccagtgaagccattgttgctctgtacaaatcttagaaatgtaaagttggatattcccttgtagcaagtgaaggtaacacagacacccctggatacagtgctggggacaagagggtgactgatctgtaaacatgagtaagaatttgtagaacatgtcttgtgtcctctttgcacgtttagcaatctggagcagagggagaaagcgtcacctggtgaactagacctcatctcgatgtaacactctttgtagactgatgaggaaatctgaaggtttgctggagcattctttgctgttgacaacacactagaagcacaaactgagtggaatggtacaagatgggaatattcccaaatggagagccattgaagggaaatcaccttgctggccccgatgtgcttctctgtctttccttttgaatcttcacccttttcttcctttcaactgacttttcttcttcccccttttctattttttaaaattaggttgtactgttttgagtctagacgagaaagatgtttcattgaagtcaaggcattgtctttattcctgtattcttttctttaattctaatgtatacttttctaaatcccaccaaactctacactttgatgatggggctcatgaaggatcccagaaccttctcctagtatagtctctgagcattgagcatctactggtgttacctgggacacagaaacacaggggcccactcttcctctggatgacccaaggtactggaatatacgtctccagacctccatgtgactcacataaacatgaagttgagaaggttctctggaaggaaacttccagaagcaaatgccagctgagtatattcatcagccttctggatgcttctcagctgtgtaaactggacctgttcccttccctgggccctttctttcagagtcaaagaaacaatcttacaccctttgaagacaagcatttaatccaaagggacttgacctcctagatttactatggaagtcacctggactgtagccagagcatcagaaatgtttgctaacttttccatggaagcctttcatctattgtcttggctggtatgttgagatacaagctagcacctaattcatcgccagttcttactgcatatcatagtggcagccaacactaatgggattaattggtcatgactggtggaattgtaaaagcacatacctccaagggtcataaacaccaagtcttaattgaaatcaaatgtatatttttaaaaagcatgtccagcatcatatactcctttctgtttgggttttgttgatattagcaatggtatagaaacctgatcaagaaggtttgcttttataactgctctcaatacaaacttgtacttcttggcaccacaagtagctgattagaggaggggataatattcagcttgattattggttacacatatggaataaatcccattttaatggtgtctaatgaacctttcatttctagaaccttacacaaaagcatctaatagaaagagaaagtaatatttcaaaggtcatctgaatgttactgaatgtcaacaatccataatcaagccaatatatattgatgatgattgcagtccagtctgattctttaaatgtgaaataattttctaaattagcaaagtgatgcaagctaaggttctttcggtttgagggagcttgaaaatgtctaattgaagtttgtagcttaaaaccagcattgaagagatttttcttggagtgaggcttcatgccatgaagtgttttcaaggcccatgagatttaaagttctgtctctgagagtttcatgcactgttctccttcatgcctacaattccattgaaatgtgcaaatggaaaatgcggctccctcccagtgctttctctcaacgggagactgaattgaacagttgcagtgggggccatcgtgagagctgatgggcatctagtttagaaccagacatctacctgattgtgtatgtagatgttgtaaggttatagaatctctaatgagagttttgtctcagttgctttgtgaatggtgacttccctccgtaccctggactgttgatacctctttgaagtcacaggatagctgctgttatacaagttcagatgacaggctgaagtagaaatggtgaattctgccaaacactttcctctgtcatgtgatttgcacaaggagctggaggatgatcgtagggtaaatggcatcttctggagcactggttcctatttatgcagatgggccccatccctagaggttgggttctggggtaggatcagagaaaccatgcttctggcaagttccctgagaatactgatgctgatgtaggaatcatggctctgagtaccattgctcagagtcaactcgtgcacaacctgcccagccgtacatacggtcttggcttccgttatctttgtatgaataagcattgcgttttattcatttttgactcctagcagctgacagtggagcgtgctcatggggtttgttcagagagcagaggctatttatatcaaattaaaagcaatgagaagatatttaacatgaagtacccagtgaacaccatcccaaccccaatgttgctcaatgtgtttgtatttctttcctctttcttaaaaactaattttattccttctacttcccttttgaactcttaagcttgattgtggtttggttatctctcatctccctgttttgtgtctgtttccgagttaaggggataaaccaggacttgtgattcagttatgggttaccaacctttggatgcatggtttcagagccaatccaggagggagggagctgagatgaagcactaaaccacagccagggataaagatcaaccagttggcagtgtacatcatagttctctgggtttatcttgaactgtgagaaccatgctgagaaaatacgtgactcaaactcaggaagtagtcctaatcgcccagagctccctacattcaggtgttcttccacaagactcactcaacaccttcaatagctacatgaaagtcatgaaaaaaaaatcttaagaggattaaaaggcatccatttgcccaaactctccaagaatccagttttagctatttgagattgtttttattaattacattttcttgtaagcctgcctaaatgttagtttatttttaaagcagttttctttaactgaacctgtgaatgtaggggtaaaactgcctccaggagaggaaattcttgtgctgaattacaaggttagtcccataatggatgataacacttcattataaaattgtttgcttgcaagtccaccaggatgccattagagaagcaaacgataccccttcctctcactgaaccttctcacaagtccattcaggtgactgacccatttggtgttaggccctctaccaagccatctgccagattgtgaggacctcggtctgtagattcttcgagtaaggtttttcagcaagagtgagtggtgggtgtctattaggagctactgcttcccaacaactgcctttactcacacagttcaaggaggtcataacctctgcctttgttttccctgaagatactaccttgtttctctccgtccttgggccattcttgttgtagaggggacatcttatgtcaactaaattttcattagtttgcagattaccttcttgctgtgctgttctaactggatgcccgttttgtactgtagccttgatacttcatgtggtttggaatgccagacctcttttttattattattattggttgtgtagatagcaatagtagcaataattttaattctaattctaaacagatattaaatgggcattgagtagaaaggatgaggagttgctagctgcatgtgccttatatgtgatctcatggacagtctgaatcttctaacacatagctgggtttcccattctatggtagaagtgggggaagtttcttctggatctggtactcacagaaaccttgttatccaagctatcactgttctcccatgctcacatgggtaccaaaaacaatggagctttctctgtaagttttgaggtgactgtagaaggtacaagagattgtgtcccaccctattcgggtatgtaccattggaactagccccagaatgacatctgccctacaaaaagagccttgctaagaaagaggctacaggatcagcatgtccaaaaccacaagctcatttcagacctaagtgtgctggaccaggtaattccaagcaaaataaactgggctccaggactttgctcagagtcttcgttcagagcaaaccttaaaagcacacatttggttggcagagaccttttagctattaattaggagttaaatcagaactctttgatccttgaacttgagatgtagttgaaaatttgcagaaataaggccccatgaattccagaacttccccctcccccgcagtgtggcattatatacacttggctctgagaaagtcgtcagctttgtcagcattcttccttcgttcaggctaaatttattttttatgtgaaatagaaatcaggaaaacaccgaaaattattttaagcaaaatatcaaaattgaaataaaccaacatatgtctgtgagacatgtataactctcaatcaaaaataagtgcaactttcataaatttcttaaaatactccagcatgcagaatgtgatcaacttaaatagatgaagttgtgacatagtcgactcttctttctccttagttcatcttttacttagggatgaaatttccagctagtgaaaccttcacacccagtgtcctccatcgtctgttgtagaaaccaaggcaatttatgaggtgcctatagcaactctagataatgtcccctaattttgaatgaaaacagtccctctcttaccctccttacttatgtccatgtatgtactgtttcctctacatttcttaaaaaaaaaaaaaaaacaccttcagattttttaatcactcaaagcataccatttttgtttcccatatccctaacaacttaataaaggagaactttaatggaattaaaagcattaaattcacataacttttctagggcttcgcaccaaagatgtcttcatctcaccttaatcatttacttttaggctttcctcagcacatttcattttgaatgttagccccgttctgaccctataatagtaactgataatttgcccacagaagatattaaattaatgctactctcaatatgtgttattaacaaaatgcaaatgtgcatttgaaatcatcaacctttttatctttctcttattcatatctaagtggtgaaatttctataataataataataacaacaataataatggttactttatttggaatgatttagcgctaagcgaattctctgtctccttgttccctttaaaaagtattttgaaaagttactcagcttggcatcatcctccatgttaacattggccactcatttggaagttgagaaacctgaacaaatatttaaagatgtgtctgattgacttgatgtagtgggtacctgttttcttcatcctacattcttggacctgtcctgtcttctttttctttcacatgtcactctgatatcttttactagtttcttagctgttgaaagtttcttccttcccagttccttcaatgtggagcaatttgggaatagaaaagtgtgttaattttttaataaacctttaagatacacattactatgtttctattgattgagccagatggctcacagtgaattttctctgacataagtaatcacagaaatcagtttggaaccaaaatctggtagggaacgtggcatatatatgctgtgggaaagatgcaattcacataaacatatggctatttttagaagcagtatttgctactgtttggatttaatttcatcttactgttagctaagtacaaactaatggttgtttttcttctctcatctcaggcatttggggtccttctcaatcactaaaacttgttttctttttacagtttgaaggctgcaagaaggccttttcaaggcttgagaacctcaagattcacttgaggagccacactggtgagaagccatacctgtgccagcacccaggctgccagaaggctttcagcaactccagcgaccgtgccaagcaccagaggacgcatcttgacactgtaaggatggcagaggcttgccaccttccagcctcagctgtgtgtgccaaggggcccctctgatggtaggatggtggaggtgtttgctttatggtctgtaggtcacaggggcagtgccaagcacagcagaacacagtgaagtgccccccccctcgccgtgggtgtaccctgtgtggtcgcttcatttttttaatttttattttttgaagttgcgaatttatgctacatattagaactttctgggaccagggttcttgagtcccttctctgtagagagcagaagtagttcaagggctttcatgcagtagatgttggcacccagaatggccactagagataacttaagtgatgatgaatgtatcaggctgtcccaaactagacaatgtatgcatttgggagggatatgatgtacagagtttgtgttgaccctggttcttatcctcttgacctaacttttcagccagcacagtgatgagtatgaatctggtcttttactatagaaaccatctgttattctcacctgcaattgatctaaaaagacagagcagatcttccccagagttcatttcatacatgctttttctgtgttagcagccacaatccttttatatcaaccttatgagaacaattgagtttttattttcacacccttaactcccttaatgctgctaaattttgctccttgcaaatgctgtttctatgtaacttttgtcttttatttcccccattatgtagataacacttctttgccttctcaagctttgatgccattttctttacaggaggccagatagatgctgtgtaatttcagttcacttgacaaagccgttgggataaatgcattatacacatcacggatctcttatcccacgttcttgcaaataatgtattcatgacagtactttctcagtgttaacattctgatgtctattattaaactacaccagagcctgaattttgaaaagatactgttatttctacacaccttctcatacatatttaagattcttctaatgttatggttgacatatttattacattttatattagtctctattagtcatatttgcagaagtcattttagctatgtatgtcatataacctttctaaacagaattatctcctaatatgcatagatgtgatggtttctctggtaaatacctgaaacatgggcaaaggataaacttttgctgctttagccagagtggatttattaatttgttcagggccaatagaatagaatattacatagatatatggaaagtgctgaaatttttcaacatagaaaatataagaataaattatgtttaatgtcctattttgttgtatctgaaatggtcttggtctaatccagtatattttccagtttgtcactaaaccttttcatggaagtgtgaccactcataaaacaagattgtcaaattgttccattaaccagttctctgtagtttcaaagccatgcttcaggaaacgtgttgtttctcaacaatacccttctttggtaccaattttagctaataacataaaacattttataaagtaatttcagcatttacttcagtaaagtaaaaatgtgtagccctttaagaacttttaaataaagctgtttaagataatgattttatgatttgaattcagtgcaacatctcttaaaactggtcatatttatcttgttaaaaagattttctcatttttccttaagattcaaactgtctcctattcaaatgtttacttcctttaacaaattggtaaataaattaaattcttgtcttccaaagctaactgtagctctttgaagaatgtttaacttatatttaggttcctttctgttaatcaccccttatacaaaagcttatgcaggattttgggataaaggtatcttttcaactaaatagattctgtactcaggaagatgattttctcacaaagattcttgaattcactataataaccctgaaaatttttgttaatacatttctctattaacgtcttaaatctaaataagagaagtaattattcaggacagctggaaaatcatgaaatagcccttttgatggagtataacatgccaatgaaagcttgggtaatcagagataaaatgacaggatagataggatagcactgttgtccacaccagagcctgacggctgattgggcatgctagcctcaagtgacatatgcaggggaggcctcaaggccagttgggaggaatggtgtgtattaggctttctccaagtgtattttaaataaaatgtcaaatggcatttcccactccacttacactagcatagatccctagagcatgccagtgttcacaaaactgcttccatgaggtacccactctcactgcaacctcaagtgtgtgtgctcatactgaaggatggatattggctacttgctccgctgatgtgaaggcagagtagggaaagctagttcgggaagggctgggtgaactcagcaaagattttcaggttaaagcaaaatctttgttccctcatggaacaaagtgccattaattgctcacttaaaaaaaaaatgaattcggtaagggcctggttcctcttcatccatcatttattggtagagttacttagaatttagtaagtgcccagaacattctagaaacataatcttaggttattcaattaatcaatcaaaagtaagtcaagatcagtcaatgagtaatcaaatcctgtattcaaatcgagcatttcaatgaaacgatacagcatgattctctctcacctttggaatgaaaaacaaaatgacagaatgtcagtgagttctaaatgttgctctcagcaagcgaataagaaagtccacatttactcagtaaatgaaccacacatgaaaacaagagcatggtggggtaagaatagctgtggtgtgctcttgtccctagcatagcaggcttcggagaagactcctcccatcaagagaggatttcagatctttctcttattacataatacaggccctagtctcgtttctcacagtagatgataattcatcttttctacacaattactcctgtttttgttgttctagtttttgtttttaatttgtttgatgtcagaatggatttgaattgttcttcccctcccacctatgtcatgcattcatgtctaccttaggcgccaagcccttggggacatacctcacatttccatatatttcccgtctctctgctgcacaggaaattgcacccttgtccccccactaagggctcattcatgtcacttgacttctctgtgactaatattactgttcttctggctaagtttttgtgtctgttgtttgagacctactatttcttactcgctttatactaattttccttcttaattcttttcctctttctgaatcaggtaccctctgaaccaaatccagtcttttctggacttttctacagcttctttacctgagccttaaaagatctgtttactatttctgacagtaccaaagattttctcagggagataactgtaagtatgtaagtataacttccactttaaaaattatacaagagattttatggttacactgcaatgtaaggtactcgctgaaaaatcttgaggataatgcatctctgtgggttcgttttgaaaggttattctctcatcatcatgatgcagaattcctgggtgtcttaattaacatgcatgagtattaccctgcactccacacctgtcacttggtgctgcttcctgctctgaacagtctgaacaaagcacgaccctgttactttcatgatttaaccacagctctgtctttctctcttctcttattcagaaaccttatgcttgtcagattccaggatgtacaaaacgctacacagatccaagctccctaagaaagcacgtgaaggcgcattcttccaaagagcaacaagcaaggaaaaaggtaaaattcaaagagagtttcccagtcaggaaagctgtgtttgaattactcttgcagtcacagaggtttcacagggcgttgggacctttgactttgaagatgtcttaagcttgaaatgaggaggacaccttccccgaggcctcagcaaggctgtagttggcacaactaatacagtcatgtaaaagtttctggggaagcttgcagagaaaattaatgccagccaccaaccccaggaaatgttaataacaaaaagcttttatggaaatttctggaaactctttctggagaaatactttttttttgtaaaagtatcagctagctcaagtaatttccactccattgaagaacttgggtgaccctagtatttgaagagagcattccccgtggttggcttgataggcactttgtgtgaaattggtggtggaggggacaaaatgttgaacttaatttgactttcacatcagtgagggatcaaggcagatttcaaaatctgcagacattagagtgttacagatttggcagaagtgtccaagtccatctagctagcatgtctgcattgctctgtgaacgccacacaatactgccactggctggccagactggccttccaaaccttctgagaaagggaatttactgtctcccaggccacttgagatctgagttttatgggctgtgtggtgggtgtaggctcataggcatgttcatgtggaggtgggtgtacatgtgtgcaaacctgtgtttagaggccagaagtcagctatgggtattgttcttcaggggctgttcactttgcttcaagtagtgaatgcacatgctataacacacatgcacatgccaccacacacatgcacatgccaccacacacatgtacatgctgtaacacacatgcacatgctgtaatacacatgcacatgctgtaacacacatgcacatgccatcacaggtggcttatcaatatacatgcacatgccaccacacacatgtacatgctgtaacacacatgcacatgccaccacaggtggcttatcagtatacatgcacatgccaccacacacatgcatatgccaccacacacatgcacatgccaccacacacatgcacatgccaccacacacaagtacatgctgtaacacacatgcacatgctgtaacacacatgcacatgccatcacaggtggcttatcaatatacatgcacatgccaccacacacatgtacatgctgtaacacacatgcacatgctgtaacacacatgcacatgccatcacaggtggcttatcaatatacatgcacatgccaccacatacatgtacatgctgtaacacacatgcacatgccaccacaggtggcttatctgtatacatgcacatgccaccacacacatgcgtatgccatcacacacatgcacatgccaccacaggtggcttgttcctcagactgaactctggtccttatgttctcacatgagcacttcccccaccaagttctgtccaacacccaagcttttaagtgtttgaataaactaggatcttctgtccatggcagaaacatgttgcactaacttggctcttttagtgctacctttgtgctgagttggttatctaattgatttaaggggattttgtaacaaatttgtaacacattaagacttaagttatttcaagtgaatgaaccctatggcaagggttttctggtcactgtgccttctagtcaaaattgtgcacttcttttcatagcttttggagatttgatatttggtgttgggaaatcctctatagtttttgtttttttttttttttgatactgtatttttgttctgtcttgaggtgctaggcttgagtaccatttgagggcttatatgcagaaagtacttagccaagtcttcatttggaggaagaaaaacactcagctacaagtatttgacagatactcttaactagttacaaaaccagtcttgtaaatcaattgtgtttttttttcctctagagattatctaaatctctttattttggaataccaataaattgttatccagaattactttgcatggtttggttatgacttgaatttagagaagcaaagggattttctttaatgtaaataaacttggaacaacaatgcttcctcttaaaataacacaatatcacaattggaccctttagcaggatctttgtctgttggctttgtcatggtctgtatcttatacattcaaaggaataaattatattcaatttgtaaaagcccagtcttctagatgagagacggtttccattctagatcattctctacttccaagttgtccctaataagtaagactaccagcaagatgaaaacactgtcacagaacctactgccatggcagtaaagagtatttatcccctatggagacaacagtagtgatgctcacaggtgtgggaacacactggacatttttagagattgttaatattggcctcatataaagaaagagtaattttgattgtgtgaagcactaattaaaaaaaaaagaccttgagactataaaataggattgtatttacagttcccttgcaaccttcagcgggcagtctaggaaacaaaggtagggctttccagcagtctggtaatatcatgtcagacattacagctcttccttaagtttgatttatgtaaaatgaagtagtccctctctcatttgcccaccggtgttgtgcaaacagttgaatcagatttggttgactttccttgttcagccctcagtgacaaatttacagtgtttactttccaaaaagtcttttctaaatctgtgatggttaattcatgaaattaaaatgaaagtcgcttcatccaacaaaagaggcagtgtcattcccaagagaagcagctgctgataaacccaaaatcagtctgtccacgctgctaaatctcaagccgatatcctagtgtgttatatttacacggtacaatgttgtcactagaccttagagagcttctaattgctcactcacgtcaagacttggtatttgaaatatttcctggcctcaataataaaaaaagaaagaaacaataaaccttttaaggcagaattaagattatttacgactttaattaaaaattgaaaactggcatgatttcaaaaagggctttacaaaaatgtgaattcatcaaaaataaccataaaaattccaaggtgataaaggcacagtggagtaatgggcccagccgtagggaattgttttgttgaaaagagtaaaactcttttctgtcacaccctgttagtcatggacttgtttaatatcccctgcctgcccgcctccctctaatcctcttcttaacctccccctagacactaaatgacattattttggtcttaatgtagccagctttatgaggcccaactctgaaaccctggctggtaacaatgcacccataagataatgtatatcaggagaggcaagttgctcttaagtggtgccctggccgagaacatacgaccctttctgttacatgatacacaccactaaaaaataagatggacctgcagtctcagccaaacattgttcaagctgtataaagaaagaaaagggaaagaacaggggcactttggattgttgtactcagagagaagtttttttgtttgcataagtcaaacacacacacacacacacacacacacacacacacactcgcacctcctcagccaacagacatccagccttgtttatcaaatgtgtgttgcacactcgtaaagcaagtaggaaagtattcaagtcaccagtaaaggtctccactgagaatagaatttagcctccagagcaaaagtctgtccttcggttcttcccagtgcgtgagtgaatgaagagaagactaagacaataggccacttgagattcttctcaaggctgtgagttttatcagaatttttcattttcaccttggaagtgccatgaacaggggtttccttcaactccagcgtgttatcaaatggacttgaatacaagcaatgcctggccaaaagttagaggtgacaagaatctttctccattctgtacttccataaagattctgaacttcgtatgagttgctaaatgctcgttagacattgacccttggttgcctgaatatcattggtattcacttttgcgaccgcaatccaagctgctgcaattaaaaatgttcatattgcatacttagaggcaattttatatggctttctggctatgtgagggcagtttacttaatgcagttttcttcaagggaaactggcaattcttcagactgtttcaagccaccacctttccccagcatcacctcaaactatatacttctagagaacccaagggttcagcttgcagtgtgtagttcttggaacaatgacgaggaagctgcaaaaatactttcctttaaattggcgtattcggcaaaataatgaatgaatcatgctttccccattaatggttttgtgctttcgtctatttttattttggcaggtggggtgtgtgttcaagtgcctccccggacttatggttccttttcattatctctcccttgttactcaatgggaatcagttaaaatcactaatggagtattaggaataggcccacaccacagtcttgactgggataagggagtccaactctctagggacacttcagtgacactaccatggtgggtgtgcgtgaggataattcttctgttacggggctgagactcaaggagtgcaaagttgtcttttttttaatagctcacaaacatctgtacatcatagcactggtgataaatgactgacatcacacctcagaatcgtggtgagacacatctggatccccatacctctcagctgagaggaacttaatttcaagaaagtttctgggagatgctcttggaagaaatacttttggtgaaaaaaataatgatgaaaataaatgattatgttttaatgaaaaaaaaacgatcttgcaaatcatcacaaattcaaccatatattgataatgattgctgcttggaacaagttgcctgctggcttctatgataacgtggcccagtgtaatgccacctttgtttttaaagtgggttgatgcttgtggtgatagaggctgtttagaagaattcacacttgtaggagttgaagagggacttcaagaagtttgtcagtgagaatgaccagtgaataaaataagcatgttttttgtttgtttgtttgtttgtttgtttgtcatcagaggggctgtattcagctttacaggaaaatatccccactgtctctgggatgatggcccaaggtcttaactgtgattaaaaactgttacccatgcactgctcttggaacaaattacatggggtgttattagatagattttctttgttttgtgttgttatttttgtttttaggtttattttagttgtgggtatgagtgctttgcctgcatgtatgtctatgcaccatttagcctgattccccttgagctcagaaaagggcattgggtaccatggaactggaattgtggttggctgtgagagctgaacccaagtcctctacaagagcttaactgctgttaactgctgagtgctctccccagcctcctagatacttgtttttaagttatttatttccaagtaagttgaggaaacactgagctgaatcatattcagtggttttcttcttcgcagagttcttaggtccttgtggtacactaatattccttagggaatatggtagacaaaagaatcctttccttcttggcatctcatggagctactagtagatattttaagtgtctcaaagtttcattattaattttgtaaatatttattaattacttactgtgtggtgggtacttgttagaaccataggaaacaaacacacagaagagatgtggtttttgccctcttagactgacgttctgatgatagtaaacacagaaaataggtgtgacatcaatgcaaagaaggatgacaatggaggactaataacaggaggggtgtgttgaagtgagacagtctagaaaagtcactccaggaactgagcaaaaggaaacagataataccacttgagaaattcactggtttcagaagaaatctactgatttcagtcaatttattgtacttcctgtttgagctaattttcaaagaatctgatattgctacctccttaggaatagttgtctgggtcatgttagggtttttattttgtttgtttgtttgttttttgagatagggtgccactgtatagctcaggctggccttgaacttggaatcttcctgctttggcatcctcagctgtggaagcatatgcatagatgtgtcaccactttagccagagcttaattgcctctttcttcagcccatcctatttagttggggtggcacaagagtgactagtcattgaaacttagtgtcttctacctcctgccaaataccacaactcaggtggtcttcacttgtgattcttggagcctgattagcaagtgaggccttggctggtcctgaggattctgagtgaagtgaggctgtgtctacactcctaagatggcaggtctagtagagacacatgctttcaggcagaagagatatctgtgagaagtcatgcctatacattcccttgtgtgtagtatcttggcaaatgacaaagctgttaaggagtgaggtcttgtgcagcaggctttctttgggccactaaccagttcccaaattatgacacggagacttattattagctatgaatgctccgcctagcttacacttgtttctagctatatcttttaatttaaattaacctgtttacattttgccttggggatttttacctttttttttatatatgtctttctttcctgcttcctccagtgtctgggtggctggtggctgcctggcttctagcctcaggtgtgtccctctctttgtctctctgtctctcctttcttccttctcttgtgtacttagatttctcctcctacaaattctctctgccctccagccccgcctctccctttcctgcctagctatttgtcattcagcttattgaaccaatcaggtgccttagaaaggcaagacgaaacaaatgcagcacatctttacataattaaacaaatgtagcaaaaacaaatgtaacaccatctttatagcattaacaaaggcatcagaaacaaatataacacaccttcacatagttatggtagtattccacagcagaaacaaatgtaacaaatctttgcctagttaaagcaaaatcttactgtgacccggggcatggtgtacctttgcaaatgagaaagacttttttggagtgaggtcttgtgttttattccttgaagccattgttcttgagtccatcacaaaattttgctgtagatcataagatcatcttatttctatccccactgagaactcttacttggaatcaaaacccaacatagaaaacaaagatggtggaatggtgggtgtctcatatctttctggcaaagcacgtgaagaaaaaagaccttctgacgggtgctttaatgggcagtttggggcagtccagtgcccaggcacaggtaccttatggaaatcagtgcttttctgattcactgaaaggcaggacattttacatttctcattctctttcttttaatgttttagcatccttgataaagatgatttggaaagaaaagtgtttgccacagagcctttgcagtctccgtactgtgtcttgagctctcaggagacagtcccgcactgcccttctcaggtgtccccttcttcatctcctcttccaaagcactcacatctctgtgtggttactgctccctctgcaagttcgtgcttgccttctgttttcagcttcagctgaactcggtcttagctctcctgggtaatactttcacatttgtttgtatcttggctgtctgagctgtgaggatttattttcagggtgacttcacacaagggcttggatacgcctgatgcaaaaacttttcttggtggatactgggcaggtggccttgtccccaaagtgtttggattggaccctgagaggtacgagcttcttttaaacagtgcctcgaattgcatcatgacttaacaagtcacattccccccagtttttccattttcctgtctttgcagctagtttgaaaggcaaaccctgggccccagaggtgaaagaggagctctttcaggagggaagcattgttgtgtcacgtagcagccatccttggcagcccattgtgactgacaacagatgaacaatgtccttggaaatactttcctccttgagaattgagtattcttggaggagccatctctcagatattgctgcagcctgtctttcaggcacatatgactgctgcaaaaatggttcataaaaaggaaaggaaatggacccaaaccagagggaattaaagtttagacatgcaatgcttgattctgcccaagggttctgtcctgagggttcatagcctataggtgaatagtctgtagatggatgaaaatgataggtttgggaagttcaagaatgtttccccaacgatacacaaaaaaatggtttttgctttagagaggttccatagatttcactggcattctgaaattaagattataaggcagaagcaagacaccttgtgaacagttgtgttatttgtatgactttggttatacctatcttcccctaagatgttgcccaaataagaatttttttgccttctttgctcttgtatattaactcctctagtattgaattttaaaatattcaaattattccacaagtagttcctcaagatttctgtgtgtctgagattttgttacacctttgagtatatgaaatgctaagacacactccattccctagaggcagtctgagaggcagcctgagttagggtttctgttgctgtgattaaaatatcataaccaaaagtaactttgggaggaagagtttatcccagcttacaactttcaggtcactgtcaaacaaagttagggtaagaactcaaggcaggaacctggaggcaggagctgaagtagaggccatggaaaagtgctgcttattggcttgttcctcatggcttgatgagcctgccttcttctacagtctaagagcacctgcccagagatgaccctgccaaagatgaagtgggtcctcccccatcaatcataaaccataaataggaaatgcaccacaggtatattcacaggctaatcaataggggaattttcccaattgatgtcccttccaaaatgattctaccttgtgtcaagtttgccatagccagcacagaaattcaagctggattttgataagatgggggttattgtgtttctggttagttggacgatggaagcagactataagcaatggccagagtcaggagtctatgtacttttctgacaaggaagcagtctagattaaaatgagagacgagggagtagagatggactgactgtatgtggtgaggtcaagggacaaagagataaccgtgtagttcctgttttccttggttgattggctgggggtgggagctgaactccacaggctgaaatctcctcaggaggcttcagttctattgattagaccaggcccacagagattattagatagtctcttttaggttagagtcatctgactgaagatgttaatcacatttgcataatatcttcacagcaatacttagatttgtggatattttgttggcaggcatggactataggctagctaagttagctaagtagagacataaagctgaccgccactagaatccattatgatcaattctaactgagggttctttattcaaagataagactagactagtgacatgagaatggggcattgtgaacttccaagtgtcttttacattggtgctaattgattattcattaggaaaagagatgggaattaattatcagatgtacctggtcttactctctttgattatagcattgaatgttcagagtaaataagttcaagctaattaatttagaaacttcatgctgtgagaatagaagattattgtgccttaaaggagtaggtcagtgatgtgttttttaacttaaatgttgcattgtgatattggaaattatgcagtcatgtaagtttattatggtttgttaaaacttacacatcagtgattctgtcataactttatatgtctattaatgcaatgtccatgtcctattgagataatgacagttaaaacactgagcatggtgcctgacatcttgtatatgtccaaccaaaacgagttattattattaggggaattatgtcttatccgttacagggttttcctagagaacactaagaggttgttgaaatttcagtgaactagcaacaatgttcttcacgtatccaattaattaattttccccttcaagtgatcttagctgcttaaaaataactactggaagcagattatgatgtgactgtaaactgataatctatccactatttttttcatttcccaaaagatctttaatttatcctttaaagaaaaatatgtttttgagcaaggcggtggtggcacatgcctttaattccagcattcgggcggcagagacaggtgcatctctttaagtagaaggtctgtctggtctacaaagctacacagagaaaccctgtctcaaaattttttttttaaaactgtgtttttgaaatccctcctggacagtctgaccactcaaatgctgtttttacaaagcctttggcttgggaatcactgcctgacactatagaccttccctaaacctgctgtgtggatggcaggcgtgtggctcttgattacaaattaaagagttttaccttgtaaccattgtagatgctgactttattctgagtcagccttatctaaattcacagacttaccaatttacttactgttacatttattactcattttatttctaccgtttgcattatctgctgttcttttggtatgggctgagtcaaaggcctgaattccaatctttccgtcaccaagcttaatgataggccctgtgatcagttgttcttttctcggtttgtcataattagcaatgagaaaatccacacacagaggttgttgctgtccatcactcaggaggttcaagcacgggagagtcacaggaccttggtgtgtggtgacagcatgggttagtattgggcataccgatacacaggaaaatgctttggtattccatttctgttgaggaaactggctttactatgtggaagtagagatcaaagtgaggggctgggcagatacctcagcatttaagagcactgtctgctcttcagagaacctagattcaattcctggcacctatatgaagattcataatcatctgtaactccagtcccagcatgtccagtgccctcttgtagccactgtggtgcaaaatatccatacacataaaaagacacaaaagtgaggtgaagcaagaattttctaaagagaagggagcatttttcttgctctatggagttttatgtttgcttaagtcacgtagcccatcttgaagccttctacagctgccatttaaacatcaggtgagatccagacccagtgtctgattcagaggtttcagtggtgatcgtggcaatagtgatattaagaaacggcttgggtccctgcagctggtacttccacatttcagagccattgtgaatgtgtacattactttattttatttctttggcctttaaactcgggatgattttttttatcactatgtctactctctctggtttgttcctgagaagcaaaaaggcttagaagttggaagggaaccaagtgtgatggcagaggtggtaggctgctttcctgcaagccaagcagcctacagagtatgtgccagcgttagttaatagtgcctaatgcaaagccatccattaagtcttgacatgctgcttgcaatcttggcattccacaaaatgttttggcgaaagaattttctcccacttggcaatccagagttctctttacgaatgctggcgaggtgtcatgcaatgtctgaaatgctcactgtttcctctgctggttgactagcttgagttagccgttgaaggattacagatggtagcctcatctctagggctatttatccttttaaccagaatggaaaattcctttgtctaagtggcttttgagaatggggactttctgcagccacactgcagggcctcctgtaagagcagagcagccattatagttcagtatcattagaagtatcacctccaccctgaagcctactagtgaatcaaaatcagaaaacacacaaatgggctaggaagatggcttagtgggtaaagtgtttgttgtgcaagcctggagacctgaattcagattgacccataaaaaaatagaagcgtaacagcacatgcctatggccagtgctgggagtgcagagacacatggatttgtctagctgaaatgatgagtccagtggaagatccggtcttacaaagtaacctggaggcaaaaaggatgcctagaattgatccctggcctctacgcatgcatctatggacacacatgacagagaaacagacacactcacacacacacacacacagacacacacacacacacacacacacacacacacacacacacacacacacacacacaccctaaaaagatattcagaaagcttcttaaagttacctgaaggtttctgacttttaaagaaatcttcattgtgccattaccaagtctaacatgtctgtacattccttatacatggagttaaaagccattacatattcaagtctgtctccaagggagctttgttttgtgagtgaccttgctggtatacatagaaatgctggattaatattctcagttctccacatcttttctgatcacacgcattatcaaaagtatctcatggaactctttggtctccaatttcctggtgctagagcacacagtttcataatgggtatctgaaacatattgaggcagacattgagagtgggcaggtttgcaagggaactgatattgatgggccttaccttccctgataagatggtgagtgtagactatggtcagactcatgatttaggaagataatcatggtgctaatgtgggggatgaattagtgatttagggtgaaaggagacaggcaattagttaggttggcgttggcatatttccattaatcaacattctttcgatactgtggttcaccagactgtgtctacacccagctgtgctaccatcaattctagctttctccatctttcaaaatgctgtcatgagagactgctaaatgtcttcctggaatcggctcattgtgtgtgtggttttctccgaatggtgtttaaatagaatgtgattctctgggtgttccctgtgattccatcctgtgttctgatggcctccttcttttacagttcagcaacctgtgtttcttttagagtcttcccaggcatgaagccttagctttctggtcatgttacatttcttggcttggccttttttgttttcctgaaatttgggtgtggatatatattgatctattttcaagctcggtctacacctctcgaagtatacttccgtatacgcatttacaagcgccttttgtagcagagtctgcaaagacttaggtcctagatttctgcattagctcagtcatgttttttactttcttcttccttttcctgctctttattctgtttttctccccttccactagaagtttcctttttcctgtaacatgcacccccgtgaaaacttatgagccaaatagtaaagagttgttccatgctttctcatacctagtaaagtatgtgcctaaggtatgtaagaccctgcgttcaaacccctcattccccagcactgagggacagagaagaagaaaagaaaaataatttatcatgctcagagtccaagcaatcctctttttaaaattacataaggtatacatatttgtaaatgcatatactttcattgaaagcaagataccatgccttgatttcagatatgttaaaatatgcagttgaatcagtgaatcatgatgacttagtactggtgcatatctatccatttttgtttccatattaaaaaatacattaaagctgtatatgatggcacatgcctttaatcctagcacttgggaggcagaggctgatggatctctgtcagttcaagaccagcctagtctatatagagagatctaggacatccagggttacatagagagaccctacctcaaaaacaaaagcaaacaacaacaatatatagatccatatatgcatgtatatctttggctttattcattcattgaataatatatagaaattgcaatgctacgataatatctttttaatgactaattttttttatattgcatgtatgcttgttttacttgcatttatgtatgtgtaccacatgcatgtctggttcctgcagaggtcacaagagggtatcagatccccttcagctagagttatggatagttgtaagctaccatgtaggtgccaggaaatgaactcagctcctctggaagagcaacaagtatttttaattagatatggctccagaacagtgtttctctgtcttcctgatgcttcgaccctttaatacagttcctcatgttgtggtgacccccaaccataaagttatttttattgctacttcagatctgtagttttgctactattatgaatcataatgtaaatatgtgatatgcaggatatctgatccgatatgggagccctgtgaaagggtctttcagcagctaggggttgcgacccacaggttgagaaccagggctctagagtcataccctagtagcaatgttattatttgctgcatttcaagatacactgcatttgtcttaaccagtcttctgccttcagacatttaggtcgtttaaaggtttttagtattatggacaattatatagtacatatgagaatatagagatcttagcatatgttgttgaataaattcctagcaacataatgttgacatgatgttacagaaataattcactcaactctttgttaagactatatgaaaccaaatttttcttatactttaaatatatgaggaaagagaatttgatggattctactagatattaattattatacaagtatcttttcctaggttttgaaaattcagttttatcaaggttactaaccatttgtgcttctttttcatgaatgactgtgatcttttctacctttcagtggagagtttgtattgaattgaagtagctatttaatagctgttaactacatcattgcacatactgcaaatgtttttagtggcttggcagttttgaaatgtaatttgccacgtggatattttattcacagaaaattttctacagatgcattttgtagaataatgtttttagattttgcctcttttgcaggtttctgatgtgacatcacttttacaaaggccaccctgctgtcccaccatgttgattaagctctgttttcattaaactttcccccatggcactcatcattttgactgatctctcatgaaagaacaagaaaggctttggaactgagtctgaaacccatctctaaccctgggaaaatccatgcactcctcttatcttcatactcgcctttaaagagtctgtttccccagccctgagctgttgtgtgatcataggagatgttgcccctgagtggactaagtaaatgtcttgcactctagggtaggagggatgcttcctcgttccttgttgccagttttgttaaatacaaagcacacttcactttaagtgacctaaataaaacatcagctttccacactttgacatgcacatcgaaggcaagtattgacctccaaatgcatcttgagagagtgacacacagctccactttgtacagtatgctggcaccagtttctttgtagattttgagacatgttacaaaagcccacagggcttctccctaagaccactaatgtttggtgattaaaaagagcaaatccctacccataagtagttttctcatcatgcatctctgaggtcttcacaaggctctgacagaacaaaaggctggtgaggagtagtagacaagagctgtctcccagtagggcctggagttgcccaatacacaagtgttgctatctatccttgaataatgtgaattttgagatgatcatgcaaagagctgcttcatattccctcatctctgtggaagtaaatacagaaataatctcatctcagagtcagtggaactctcctccatttgttttgcaaaataataatacgattttattgcaattatgtcctggcacaaataatcctagggacctaatcatccctactgttatcccatttctcatctctgccccaggtgccatcttcttctacacagatcattaagcatgaagttgatcagaagactcaacatagcaaaaacacaaacttggcaccattggtgaaagcaatggtgaacttgccttgaaaacatcattaataatggggacaagtacctacttccgtttcccttatgatatgctgcttcaaagtaaaggagaaaaaataaccattaagtactatgtctcctaactcactgggcatttttcctgctgacttcctagattatcacagcaattctacatattactttggccttctgttagagaaagtggtgaagctctggacatgcagtccttatctcagatctcttaaggcccctctaggtggctggactaggagtgccatccagatggggctccctggtctcttttgtttctgttgtgcagatggaagacctgagattctgggaagcttcatgacctcaccagttacactctgtgcagttaccagcctcaagctgaggtcttctgacctcacacacatagtgttcctttgattttgctattctttctgtggctattctgatttctcactatggacaatttgtcacttgttaacaatttcttggtttaatgacaattcccagatgttctatcatggcttatttctatagatggtgtgacaagcttatgttgtttaagtaccttcaccagaacttaagtgtctgttttgatggctaggccagcagtactattcattgtaggcagaaatttctgtcccacaagctgctcccaagtaaccacatagttttaatattagttataaatgattggccaatagctcaggcttgttattggctaactctgatattttaattaacccatatttctttatttatgctttgccacatagcttggtaccttttctcagtacagcatgccatcttacttcctctgcatttgctcgaaattcttggcctcacccttcttcttctcagtgttctcagtttgactttcccacctaaccttatcctgtccagctattggtcagtctgctccctttattaaaccaataacagtgatatgtattcacacagtataaaggtatagtccacaatgcaggtgggataccccaatgctagacttgtcccaacttgggtgccagacactatttttccctttcagggccttcttttagccttgtccctatacatgaaatcaattaattatcactgtttccttgatcactcaggtctggactatcctgggactttgtaagcatgttctggttccagaagtgtagttggtgaacagatacctcctgctgccattatggctcctgtcactcaacattggactctagaatggtgggggcagatgtatttagctcgacaaattatttctgtgaaccagaacctcatacccatctctccaaaatattcacatcctagaaatgaccttttagatggcaggagttgtggctaggttttacccctgctatgagggagagcctgacctgctgcagttttgtggtaatcctcctgcatcagtgacaaatttcacattattattctcaatagaaataaccgattaggtccattttcttgggcctgttttttaagtccaggtttccacaaggtaacattgaaaagggctgtgtttatcttatttgtttatttatttattgttttgtttttttgagacaggatttctctgtggcttttggaggctatcctggaactagctcttgaagaccaggctggtctcaaactcacagagatcttcctgcctctgcctcccaagtgctgagattaaaggcatgcaccaccactgcccaccctagggctgtgtttataaaagaacattatgagcttggcaaacttgattctctcataatgaacaaagcacacttacctatttttgtgtatatatgtgtatactgttgtgtgtgtgtgtttgagcacacacacatacacattgcatatgtatgcacaagtatgtggataccagaatataattgtgggtattgttccatctaccttggtatttgagccattgtgtctcattagcctataattcttcaagcaggttagagtgttccgtctcctactccccgagactgagattacaagtgtatgccaccttacttggcctttaagaaatgggttctcggggtcatatttaggtccttatattttaacagctgacattgtccttatccctacacatgtttctttttattaagagagagtcttctggtttctcaaagctatttgctcacaagaacatataaacccaagagacccctggagaatctcttcttctcagagagtccctctataaatatacaggaatagccagatactagcccctccttagtagccaaggctagaggaatgtctcagctcttaggaacagctgctcctcttggagaagagctgacttcagttcccagcacccacatgagaattcacaaacatctgtaactccagttctaggggattcggtgccctcttctggtttccttaggtaccagacacacacatgcaggcaagcacttgcacacagttaaaagaaaaccaaatagacttgactagaacatgtattgtgtttcatgtgcttaattttctttggccttgtaaaggaatgtaggcatcacattctaaactgaatgtcagtggagtgtttataaaagaacagttcagatacgcttatgctcacttgcttggcaatgccacactttcttctggattccttaccaggcttagggcacataccctgctcagggagacatcactcgctctgacagcatgctttcatttgtaccaccttctggctccactcctgtgagctgctgacactaggaacgacagggccttggatagaaagcagggatatttatgttggtttgattaaattaactgtggcagtgaaaacctcagaccttcatttcctgcctggtatttgcaatttggaatggcaacaccgcatttacgtgcagttttgctgtttacatggtgttgcaacattttagaaattcccagagacacttaatcttcctccaaacactggtttataagcaggggaccaacttattatcacagagtgattcctctgcacccctgatgaataattctgactttgtattgttcctctttagattgcatttctccactgccttttaatttgagtttccctgttgaacctaccaataaaaggacaaagaaaaatagattttttttttacaaaaagaaaattcttttaagggttattgaacttagaaatacttcctctattgttttttcatgaagtctcatttaagatattttattaatgcaaagaggcatgtactcaggctaaggaccagtgaacagtaaccatggcaaccaagaagccatttgggaaaagaaaaaaatgcagtgaagagtaagtgttttaatccttaactttaatcccttcacttcctgttctcaaaatgaaatataaatcaggcactgtgcagcactgcaatttttctctgaaagggacgttggcaaaagaggattagtaatggacagacatgtttaagaagtttaatcatacaatttgttgtaaaacttttgagaccacgagtgaccggttcctttgagtggcgtcaatgagaaccaacaaaacatactttgaaactgattagagagttggcacaggggggcacccatttcagctgtggtaatgacatgagagactaaggaatttgcttggtccctgcagtagggagggagaagactgggggtgtctccctgaatgaatagaaagattcttttgatcgtcatggtctgaaggaaaaattaagttgcttgtagtccacacgttgccatttcttggtgtttgattgctccgggagttctgcaaaggcctggactgtccttccattgtcaagagacttagatttccactcaaaagctcagacttgagtttctttggacagtaaaagaggatccttaggaagatagtatattagttcttggttgtctccacttttttaaaaatgtgtgtgtatacatgtacatgtgtgcatgtgtatgtatgccaagccatgacatgaatatgaaattcagaattggttcttgccttccaccatgtgtgaatcccagggacttgaactctggtaatcaggcttggcaacaaacaactacaccagatgagtcatctcccctgccagttgtctctacttttcagttttattattaccttctagatgaactaaaagacatggtttacttattttctgatataaaaaaatccttgatttctttttaaagtcagattttaaaaatggctctcacactgacttgaaacttcggatgtttgactcctcacctttccttccttctacattgcagcattgcttgtggaaaaaggatagcatgtctttccatggtactcccgtttcctttcacacacacacacacatatacataagagtttcttttataacatttatttctggtggtctgaaagttcccagcacacagggctatctgcaaagatctgaagtagctacaacttgtgctagcttcctgtggtgtcagaatgtgaaatcactttcaataatagcatcttcccaagggggtgctgataattatgacagacaagcaccatgagtccttggagcattggagagcagagttagagacagccgaccaagttcagagctccttgtagcctctgagaacaaaagctcatgtgctaaaacctgccagggccagggcatgtggatgggaaaggggacttgagcctcgttctccagagtggagaacctgtgcagaaccaccaatactcgtttctgcttctcctccttcattgggacttctctctagctgtcctttttactcagtgaggccagtgttgcttaagacattgcttctggtattccatgcttacaccacacatgaccgtttgcagtcttcaccatctttcccatccttgccttaaatttgtgcttctttaaccagcatgtctggggtgcagttgttttatttatgtattaatagtttttggagaagagattgagccatttgcaagtggtgagtgaatgataaaaaaggataaaatggtaccatcctttcccaaagttcagtagattctagacatggagatggcttagcaggcctctcacagactggaggcatgctctagaggaatctagtccctatgattgctgtctgtgccaggcctcatttcagatggtccagtgcaaaagatagtccttagacgatggcaggagaggtgagaatagctgtgtggtatagcacttggctagcatacactggtatctttagcaaagtaagtctgtccattcagagaaataacatcattgaagttcttcttttgacagtgtgacctctgaggtggaggttagatagctggcgaatttcaaaggctgagtgtgtggccttagctcctagggctatggccccatcccttactcagagtcagatcatcagcatcagcggggtagattgtcaggaaggggataggagtgagagtttggagctcccttgcctataaatgcttgtgttgttcttatcagacatatgctagaatcttttaaagcatggtagaaagttgcattcactcccagccttttcaggtgagtgagagatataaaatacctgcatggatgtaatgatttagtatttcctgttggaaagttggcacttttgcacattctgagaggcaacatacagatttgagtagtgaaaccatgtagtgaatttagatgtctacatatatagaatattatctagtaaaatttggcatgaatgaaaactgactaatgatgggcataaactccccaaatatgtggatttttgaaagtttagtttctgttaagatttcaactggttatttcctaatatattcccaattgattattgaaggatgtttgtactgccttgccctgttcttccctttgggctgaatgtgtgaatgcctggttcagtctgttcagtccacctttgtggactgtcctaaagaataatcatagattaataaacccttaacagccattacagatttgttagccactctttgagttgtatgtttcttccccaaacattgttctagaacactgtttatattttaaaacagtaatgatagcaccaaaggactgtacttacaatcactcggtgacttctgtgatgtgtggctgcatgtacacgtgacacacacactcactcacacctactgtgtgttctgtgatgtgtaactgcatgtgtgcatggcacacacacacacatacacacatatctactatgaaatgaaatgacagtgccatcaccaagacaaaaggaaatggccattagagtggaaaaatttcaggttgggaagatctagaaaaattaaaagggatacgggacatggaatctgactttggagcatatgcagagtatctgtgtaagagcacacagaaaaagggaatgtggctgggcataggtggcacatacctttagtcccaaacactcgagaggcagaggcaggcggatctctgtgaggtcgaggccagcctgatctaccgagcgagttcaaggacaagttccaaaacaatacagagaaaccctgtctcaaaaacagggggggggggactgtgccctaggaaagtctgtggctgggagcaaataaggagccccaaatgagaatgagcggaatcgtagggaagagcatctctgtgggtgtgacccagaagctgagacgggggcagcatcaatagggagagcgggagagccactcattagagtttgggttataggtaggtaatgtttggaaggaaagagagatgggggaaggagaggtgggggagcagaaagccaagttctctcttctgaaatgatagactttgatttttagaagtaggcatttgaaaattacacaaacactcatgcgcattacaaatcagccttagatccgttgcaaccattccatttttattacatgaaagaaaggaggagagaaacactcaagatcctagggtcttggtagctactccctcctccctatacttcttaaactagctcaagcaggggctgtagtcaaaaatcagttcaagggaagacaatgcagagctggaaagatgaacaagcgaagtaattactagatagctgactgctttaattaagcttctagaacacttgaacagaaagaaaacactacacttcaacaggggagatggaatgtgtgtggtcacatcagtgcagtgagccagtgtgggagggatttatgaagctatggttgtatggcggaagtaatcactacttctatggccaagcccaaaggctgcaggcaggaggatgttgcaataaaaaattccatattaatacttccctgtttatataataaaaaaatccagcaactttcagctcagtgtcttatgtttgagatatgtctcatgaagaaacttgacttggaccatgagacataccttggactgtgcccacttttgaataagatttttttttttgttagaaaaatattgacttgggaggaaatgtgtttacaagtgtagcattgcagggagaagcccaggcactccatgcttctgtgattgacacaactgtttgatcttccccttcccatctccatgcaggataatagtaaagagtggcacaggttttcataagctcggatgtgagtcaataatgttaacatccctagagtgttctggaaaggttttgttctcctatattttttaatctcttctgagagagtgaagactagctatgttctctgacatagactcatccagggtgacgttagtcctcaaaaatagtgctcatgtcttgactatacactctctgaccttaaactgggtctgaggctgagaccccactgttttggaaacacaggtatggctcttgacaatcataatagcttccttttcctcttcttcttgggcaaacactgtaactgtaaacaactccagcagttgtatgaaggtttcttctgtcacaatgtaataatccttcagaattaatgtcatcacccccatgtgcagaggaaggtcctgaaaccttgtgaggttaagtagccggccgaaggtggacagaaatgagatctgaacttggatttgtttgacctaaagtttctcttatttttctttgtcatggaactccactgtgggaaaaggaaaaccgataaacagacagaggaaaaagatacagaaactaaataatgaagttctaaaagaaaaaaatacatgtttgggacttttacagtgtctcacagtaaatgttaatgaaaccataataattaattgaaatagcagttaacacatgttaacactgattgtatatacatcatgaattggtgaaagagccttatgtgttgcccctggtaacaggtctttaacttgggtcttgggctggtgggctagctcacaaggaaaggcactcaccgccaagcctgattatccaagtttgattccagagcctccatgatggaaacagagagcctacaccataaagttgtcttctgacccccacaggcatcctgtggtacatgcacacacaacatggaaaacaaataaatgtaaatgtaaattaggtttcctgactatccacatcatataagattagtcttaaaagatatcgcctaatcttttcacagttgtcagacgtttcataagaaagaatataaaagttcaaactaggtccagaccccacgttcttgtttacagttggtgggggtgggggaagacactaatgtttattttaatggttactgatgacaaagtgttgttcgctgggcataggctattttgtaggtaatttgattttggtcagaggtatgtcatcattgttagttccagaaagccagtgtattctgcaaatggcagtgaaagggaggctgctggtgatctgttgagttacgtgaaactaactaatgtgctgtaccagcgaacagcagtggagctttagcaggtttgctttctaatataaagaatgctcaaaagcaaagattgtcacacacaaggaagggttagggtgttcatttgatgttctgcttgcactatagcagaatctctgcaagggccgggaactcagtcagattatgcactcttatctcttagactcacaaggtaataactgtaaaatctgaagaattcatagacaaatgcctagtaatacatggcttttaaaagttgctgactgttcagactattttgataagggaaatacaaagtagaggaagtcaagaacaagggatgcattggttctcttgcatctctcccggtcaggcagccgagtcgttgttattgcttggtgttatttggacagagagatccagttttaagaataattggagcgttgaatgggctaacatactacgaggaggagccctactgacatttgtgcgccacacatggtgcttagcactcgctgtaactatctccttaagttagtaaagcaaggcagctaaggcaccctcctttattcagaagcggctgcgttcagtggctatgtctacatggggtccccagccactgggccatggtttgttgagcctcagggctccacagttgcatacttaagtatcctttcatctctacagaaaatatatgaagggactggctgacattgaagtttggacacttcccctgtcagggctgaaaccctgccatcctatatagcattttgaagctcctcaaatactagaagaactataaaatcagactatggtcaaagttgttctgtgtggtctgggggctaaggaaaagaataagccccactgggcaaataatagttcaagtaaaattcatattctctccccccaccccgtctctcactcggcttcccctctctcctctcttattaatgtatttaagttagcttgcagactaatgtgtgttgttgtgacatttcatgtaccctgccatattctgctctgattcaccctcttgcccttccccagtgtctccctagtgtattttccctcacctctgtctggctcctttcttcacttttgctttcattccaggtacattgcccatcgcctcattttcccccttcccttaggtcacttcttcctctctcgtgatcccttttctaatttcatgacctatgcacatataaagacacacactctcagacatgcacacacacttctcatgagtaggcctgtttatcagtggaggatgctgagtgctaagaaaatggatctaaatccttctgattcacttcaaggctaaattgatcgatgctgtgggaggcagtagtactttgtgatttagtactgtaaatggaaattgaatttcaattaaatcaaggaatcagttcctcagatgaactggtcacatttcaagtgtctactactcacacaggaccagtggattccagtgaaatggtgtagaaatttggcaccaatagagagctaacaggcaggattatgagaccctcaggtccatgacctcagaaactctgtgttgctatgtacagtttcaaccaactatcgtgtaaactaacttatttttgtgtatatgttggaaatgtttttccatggcattgctaagatatatacctagtcatttactttggtatttccatccaccaatgatgggtacagtttggtcacttgataatcattggcaaccaaatcttgggattcctagctgggcagtcctgtctttttttggtgccatttcctaagacttcactcttacttctatttctccttgcagattggtcattcccaaaggaaacaaatttgatagcagattgttggaaattaattacctatgatacacagagccacttcataaatgtcagtcctgaggaatcccctagagaagaaattcttacattcaattgaaaattaattgtaattaatataataggttaattcattgtaattatttttaagccttttggcaatgagttaattccctgagatccacgttgctcagagtgtcatacagaacactcgataagaatgttctggtaataaaccttaagcctctaggaggaagaaaaaaaaaaaaacctatttgtctttccttctggctgggtttcttcagaaacatattttggtggcatttgatttctaaagaacaaaggaatcctgacaaggtgatgcataaatatgcctggctcaagtggactctgctcactggagaaggggaacacaaaaagcctttgattgtgcctggttttctttggaagtatatctgcttcggactcacagaatgcctttgctcctgggataaaatgtaatggaactgcaaatgacagaatctgctcccccccccaccctgattatttccacttgattcacttaatcttggatgattatccaataatgtctgaaacaaacaaaagaaatgacgggagtggaattcctggcctgtttgaagagcttataaacatgaacagaatagccttgaacataaaaacaaatacaaatcaccactgtcggagccttgtttttatgattaggaaaagttactgtgttgtgagggaagcagctcaagttcccacacgaaggaagcttgtcaagctgtgatgggtgacttcattattaaagttgaaaaacaatcatttggaacaagtatttcataacacgagaccatacagaagctacagagctactgtgtttactcgtcccagggaaatccaaaacacaaaacacacacacacacacacacacacacgcacacacacacacacacacaaaccctacggtggttcactgacggtagaatctttaacactcagtgatccacagatttgattggtctgacaggtcctcgtaggttcatgagcctgactataggtttacaaggatactggcagctctgttagtgctgagagataggtcaagactcagtatttcaaaacaaacaaaaattttcttaaagccaaggtatagttgccccttggataaggtatcagtggcagctgaaaactgcttgggatagtcctattatttgttttaaatttcgtctctttttttgcttttgcttgttcagaatgacctataaaatccaaagttaagtagcctcctagtttccatattgttaggcttgaatgagtgtccccaaaaggtccatgttcaaatcaccatttggagatggtgaaacatttaggagttcagcctagggagagacccttaaaacatgagagaaagtggtcagatcctggtttgggcttcttcctgtatgcttcctggcctatttggcaagtcagttgttcaccaggtactcctggaggtatgtgcttcctttagcagaacctttaaagagttgactacagtctctcccccccccctttttttttagaaggaattgccttgatttcttaaagtaaaggaaaactaattggcacacatatccttgatgtgtaaagagcaggtccaaaaacagaaatgtgtccatgcattcttttaagtcttctgattgactctgggcagtcccgaatgaaacaacactgtgttttcaacatttcctaagctgggcacctcacaagtctgctgtgagccaaggattcaggtgcctcctacacagttcaggagagaagcaggacagaagccatgagggggggtggtaaagtactgattcagatggcctcctcaatcacaaagagatacagaatataacttacacctcagggtttgtctcagatcaagatggaaagggtggcagatctgtgctagctgctgactgttggcacagagtacagaagctgagagatgggtacagcacagctgggggagaggaagcacattgccaagcacagaagggatttgaatggagcatcagtagtctccccttcccgtttgagcgtgaagtaagagatgatcatgtagtctatttttaacatcacacaccagtagatatagtcacttcctttggagtattgaggttcatgttcaattttgtacagtatagatgacacattgccttgtactgaggcaacgtgtcagcaaaacactcatggagattgagttgtatagactccattcatatcaagacacaaaaccccaacacacaatctagtcacaggattatgggctacagctgccacagctctccctgccccctgtgtggttgatgttgactggcctggtcaggggaggtttcattttgaagaatcataaactggatcttggaagaaggacgctgggagtagagggattcctgtggcagacagcaacaacaaactcagtaggaggtttgcagacagcaaaccttggaggacatgttcatccaggaaatggggagttcacaggctggagactaccaatgtcttagtctttgggactgtttcactgaagtatccataaagaatcatgcttcttaaatatggtagcaaatgctaatttatattagtccatctgcagtgtgtggactggggatgttctctaagtggtccagactcatcttgccctgggaaccagcccaagtgcagatgccttcaggttctttgtgtctggtatccaagaatcacccgtctccaaactgctcatttgtttctagtgtgttccatgtctcttctccaatgcctcccaaggccaaaggatgggttctgctttaggcttcattgatagggagagatgatacaggttatatagaaactttatgaaggggaatggctttcgacccgtagtcgatcttagcagtgtacacctgcacactggagaatctgagaaccccatagttgttcagtccacagagttagatgcctcacaagtctcatcctcttgctgaagacctggaagattctgcaagagccactggtctttcaacattgaaattcaaaacagctggagtctgatggcagcagagttaggttttccagcaatgcatgcaagctcactgctttctcctcagacccctttattactgcatgctttggtgggaggtgccacctactctaaaggaggaccttacatcttcagtgaatcctcctgggagatgtcctcacagacctgcccggaagcttatcagtcagttgatttctcatcttaccaagttgatggtcaggaataaccatcacaggacctgtcccggataccccgtcccagctcatattctgtatcaaattcagctccaccttccaaagagaagcctgccacttctcaacacctctgatgccagcaatcctctccattcatttggagcgatgtaacagctcctccatcagtagttctgtctgttttccacacagttatcatggtatccacagtacaaggcatctccccatccatcctcttggcttgccacagccacagcaatgagtcaaacactaaactgtcatatttctgtaggccttaccatgttgaaccctggccgtttctccagccctgttctgtatattgttgctctattgctcacttctctcttatacctgctttcagagcctgtcaatgtctcccctctgcctgaatattgagatgtgcatctgactggctttcttacttcatccaggaactctgttcataataacccctccccttagaaggcttctctgacttccaaactagaaaatgccatttgggaaacacagatgtgagtgttgtccctattgacttggggaggtttttctagagctggagggcagggatggaaagaggaagaagagccaagggagtgccaaaggaaggcagaaaggaagcactcttcggacacagctgggtcaagatcatcttatgtcaagatcaggatgtcaagatcatagtacccccatctgaagaagcaggggtagttatctggggggaagcattagtacccttggaaggacgacggtgcatgcacaatgttaaggatcgcgagtgtcaggcttcataataatcttgtagtagatcacagctaaagcagggaagaaacaaggaaatctgagcagaacaggtccgttctgtttattaccttttttctctactccaagagaagatgtccttccctactgggcatgatgccagaaatatgcattagtaagaaaatatgcttaagcattgctggaaacccttgcatcaaaatctgctgacaggatcctggataaactagaagagaataacacaggacggtggaagtatggggctgcactgtgtagtgagggaaggagaggagattccagagcttggctcatataagtatgcatcatggcaagaaaggagttagaaaggaaggatggacattcacatacaggggtggatgctgcagtccagtgacacggtgccatcatttagcctgcacttccttcttcagtgaaacctgattacgtctgctctttcactgatttgatgtgccccacccaggttgtaggaaataatctccttcctgaaggtcacctgtcaggacattgatcacatctacacagtccctccacagtatcaattaggcacatgtgtgatggaaaaactagggcagtagctgagtcaggttggcacacagcactaactgtcatgcacccctgcctcttagaacccatgggctctcaaaggatagccttggagactctagattacaaaacaaaaccaacaaaatcagaagctgagctaagtgcctaggcaccaggtagcagaaaccttgcaagataccctacagtattgacagaagctagaatgaacgttggtgaggtttgagaggtcctgcatgactgaaccaggtccctgaccatcctcagaacttcccacttttcccacacacgcatctccaactgcactggcatcttttcccagagcacttactaccttccctacaatgtatttttagtttattaacttcctgatgttgaatgcaaagctttaggtctctcctctgatggttacagtgtttcaagtacagaaaatagcacctggcatatggttgaggccaaagaaaggtctgtatggtgaatgagagaggctgcaaaaggatggtgttgtctggggagaatgcctgaaggcaacagttccaggggaccagtcacattgtccattcaacacatcaaccctttgcagagaatctgtggctccagatccctcctttatccaaaaagagcaggaaaggccctgcgggggcagttctttgctctttcccaacaacagcgctaagttttgtaggagattttgttttcttcttgttcaggtgaaggaatataaatctaaactctacctaagaattgagcctcatgtagccatttctctatgtgcattttgcagagaggtagatacatctgtgggaaacttaagattctttttatgataattagtacttaggatgctggaattagtgattactttccactggagataacaccaagcttttaaggttcaaaggtctcagggaggcttctcacaaatctgtcaaggtgttttgtaagatgcaaagcacagaatccccccatgttggttgaacttattttcatagcatctgtctatccagtgactggaaaacatccccatctttgtcttcagtttctcctcccatggcctttcctgaaacctgctaattagaggtctgaagcttgtgtctcaatgaaaaaataccacgttttaaaatcatagctaatcagagaagatacagtaattttaacttctacttgaaaagaatattatatttttatcagcctctgtctccacagtgcatttcctctctccaaagccaggaaaatccctaactcggcccattagaattcttagagatcagcaattctaaaagggtcatctgcagaccccagcatcatccccacatgggaatttcagaatgccccttgggagtttctgatgtgtgccaagtcagaaaaatacattcatagatgatcctgacttaattaagctttgtcctgcttctctttcatatattcttagcagctaagatgttgttgagataaacattaggaagttatttcttgtaaatacttgaatttctcattcccaacctaaaactgtgtatattgagagacacccctccaggagatttgactctgccttctgcctcgctcatttcagcctggaggaccctctcctactctcttgatctgggatggatatacgactgcatctcatgacttggtattcttgtgtagctctcctctggaaattctgcagaaggttctaagggttgtttaatttaagaagcacttttaagaaccatgcctaatcctagagaaaactgaattaactctcaccacaaagtcgtatagaatcatgctgctggaacacatgaatgcctgtagaagctagggaagaaccgcctgtgtttgatgccaggattagctatggccatgaaattccttggaacaatctcactggtactgataactggaaaaccctagagtggtgggtaatccaaagcagagaagcattcatttctgcccttagtagaacatgtgcaccccagatcacattttaatggtggatgataaattaaaagtgatcaccagaactcattctaagccttgatttttcccgccccagtttttcttaagcagcatgtgttaggttcataagaaaataactgatgtatctcccaaaggccctgagatggctaggcataaacataggccgtcctggttagaaggttcagtgttctatagctgtggaagttgtgatgatctcattgatatgtgagctaaatggtccttctgttacctaattccctctgctgttttcatattcttatctaatttttgggtataggtttaatctcatttgagatccaagaagtgccattttcttttgttgttgttggtggtggtggtggtggtggtggtagtggggtgtgtgtgtgtgtgtgtgtgtgtgtgtgtgtgtatgtatgtatgtatgtatgtatgtatgtatgtatgtatgtatgcatgcccatgtggcttcatttcttgattgctataaaaattatctaaggcagggcactttataagaaaatggttcagttagctgtttttgaggccttaaagttcaaacactgtgatggccaagtgagggcccctgtggctgtcacatagatggtatcatagtgggagcacaagttaaaagagtagacaacatctacagagtgattcaagggttaggatccccctcattgtcttgagaattaacttggggtcccacaggatctgccttagtccctcctgaaggcatcaccgtccatggcctaaccaactggcactaggcccacctttgaatggtctcgccagctctcctccttttcataccaggaacctagctctgaactcatgaacttgtggggagcaacaatattccatctgaggcagactgtccttgtgtttgagcagggtgcatttcattgtctctatcagttgtgttcttgtgatacttagcagccagaactacggataagaagccttagtgtagagaagttgccagtttctatagggtaaatatttcctcaggaccagtttcaggcgatctttgtgacatcactataaggacttcagaaaagaggcacacacacaggcacacttaaattgttacgtggcagttctagttcatggttgaaatgtagaatatttagaaaacagagaaaagatttcattttatctggactgtctgctattcttaagatattgtatataaaattttgttttgccatcattatgaacatagtattccaattactaaatgcatgatttttttaattgtccttattatgaatatttaaaagaattttgtaattttgagtattgctataaatcatactgtatatcattaggagaatgcatacataggtctttgggtatccattgtccttcatatttccaaatatttccttaggaagtttcgagaatcaaattattttgattatgggtcttaaaatctattcccttatgcccactataaattttacaccaagatagtcacctgctgaaaaacataaatttctacccatgacattactaccacagatacttttatgaaggttttgatgtactgataaattatttttaatatttttatttgtcttaacgtgtatgaatattttgtctatatgtgtgtgtctatataacatgcgtacttagtgctcacaaacaactgaacccaggtcctctgcaagagtaacaagctctcttaaccacagagccatttctctggcccctgataagtcagtgttaaggtccttcttggaaagtgtagtgaatagttttttttaaacattatacttagtttattggaaaacaaaatacttaatgaaaagctgcactaaacatttccaaaaatccatcttttgaggttatagttacatcatttcttctttttctcactccaaaccttcccatatacttctttgctctttttacaaatttatggcctctttttgaaattaattgctgttacatctataatatgcatatatattcttaaatggacccctctcagtctgtataatgttacttaaatgtgtgttttcagagttgactattggtattgaataaccagctggtgtacccctccctggagaagactgttacacctgttctccagtctttagtcgtctgccaatctttgcgtagcttaaagcttcaggggatccccccccccacctactttggcttgtgttattgttgttgccctttgttcggttcatgtttcaacagtcatggtgagacttgatggatatagtatctggttttaatagacaacagtctcacagcagagtccctgatccttgcactctctctgtcccctcttctgtagtgttcccagccttagatgtggggatgtctcatagatggatcctttgggactgggctccacaactgtgttttgattggtgtggttttctgtaatggtctctgtctgttgtaaagagaagtttctttgaggagacatgaggactatacttacctgtagttataaagacatatctttagattgttgttatggattcgtagtaaagtggtggttgtaggttctccgctagtctctatctctgactttgatggtcctgagtggctagctaggtttccagtagcaaacatgtttccttgttgagtgggtcttaagtccaacaagacaactggattgctaccactgtaccctcgggtcaccatgccatgcagttgtcgtatatgcattatcacccacacacatgcatacattcacacaaacacacatatatgcacacacgcacacattcatacacacacatgtatatgcaagcacttccacaaataaacacccacatgtaatgaaatagatcaggtaaattttcacttatgctacattttaaatatattttgttttaatttttagatgtgacttacctgtaaaattaattgtgtttgactaaatgaagatgtaaattcctactttttgtgtgacataatattaatgttagcagtttcatttaatcattttctatatttaaacttcatcctgagtatgttgctctcatgtaagatttctgagcatcaaaagaaaaaaagttggtttttgttttgttttgttttgttttgttttttcctaagcatcaaacctcattggagattactgaattttctctgatatttttttttttttggtgccactatccctgttcttaaaagtacaatgtggacaaagtctgtttgagtttgtttttgtcatcactatgacttctgattagatattgaggcagcaaataaatgggactataataggaagttgggttctcagaagtgcagctatcaaggtctgcagccacgtgtgtcctgaagcacctgccaggcattgtagagctagagagctgacccttctgttgatgctgttacactcatgtctttctctccatggctgcttaataaaggtttgtggattggatcgcatcaacctttggggtatgaggcctttccatgtgtcctaaggaccagcctttttcatctcaattctttttttcccctttcagctacggtctagcactgagctccatccagatctcctcacggactgtctcgctgtgcagcccctgcagccagccacttcccccagagatgctgctgctgatggcgctgtgggatgctccccagggccagggcctgggcctgaactctatccaggtaagcatgtaacagcaactcttgttcacctgagaactcacctgtgatcatctgcactcactgtgtcagtagtctgcagttgttctcctacgctggcttggcaaagcagaccttccttttctctgaaaaaaacaaggccaaataacacgttagtccatctaatactgggctcttgctagaagtttggtgcgctaaacccctcccaagaatcttaaacttactgatttagtaagaatagccattaatgtccctaaaccaaaggagcagaaggaaggacactctaggtctttcatctacctaggattgaatcataggtgaccctgtattcagaaaattgcaggttgcaacgaaaaaagaaagactagtctaatacagcaagagagctcattgtttttcttttattgcattggcttgcagtttgggtgcattttcaagtctctatgacggtggagtacttgggcaagcatagttagttttactactttacacacagaaagctcttgctgcaagccatctgaaagctaccagcaccacattccagacaatgagacttttccattttcagtgacttgcaaatctccctcccatcttcatctgattccatagccaggttggcagtgagaaggactaataagccatagagaatgaagaatttactgatgcattacagtggaatagtagaaagacatgcttttgtggctttctaagcttgacagttctcaagacaatccagtgcagcagaaaagggcatcaagcagtcatttcaagagcatcagtcatcaagacattcttagtcacagtgggccagcatcaaggaacctttaacagttgcttggggacttattctttgaaacaacatagcctcatttattccagattcagagagattaaaactgatttgaatggctaaccaaatcttaaagagacacgtagatgcttcatcaaaagtgcctggctgctgtataacaccaccaacacatactgaaaagcattgtattagagatggataccttttgtttgcataggagctcttggtttgcaaattgccaacacacgaacattcattctaacgcactaaatgaatcagcaatcaggttaaaacaacctattaaacatccttctactttttcaggcaatgatctggaactcagagtttaagatcaaagctaatcagaggcgactgagaaaaccaacatacaatatgatagttttcaggaatttccagtcttgtcccaaatcttggacacgataacacctgcaactatggaaaatgttgtctgtgttgtatacatacaacatatggttcattgtcagcactcttgtgttagactgggtgtgcatttttacatgtcagatagaatttttaaagttttagaattttcaacttcttgaggcttagttttagtttgaaatggccttgtcatgccagatagacttccactttttacttttgatgcttttctatatttgcttctcagaaagatcttgagctcttgcctttgagcctgtagctctagcagaagagctgtaacaccaggcaaggaagcatcagttgccacagctgcccacatagcatcttccagttggcaggcattttctgcctctgaaatgacttgaagtaggcaggtagtcaccctatcaactttcccctgggtagcttatgagtctcaaagtttattcttcttacttttatgttttatgtctgtttccctcgggtgctattgtactttcttggcctctgaattatttttaaataattgatcatactttttgatttgctgagtaatcaaaaaaaatcacagaggcaaaaaccagacagggaagaaaactataaaaccaaacttacatgccttctttattaagccctagaaaggcacatgtgtgaagtgcatgtgcccatcagctgcacatggctaaaggtctgcaggcacatgccaactcatggcatatgccaaaggcatgctggaaactgctcactaattagttcaatgtgaaatctgaatagttaagtctatttgatggaggttaagaagtgcttagagatgggctgggctgtggttcagtggtagagggcttgtgtagcatgtttgagacctcagattccatcctcaacactgggccagggtgtgatttaatggtagagggcttgtatggcatgtttgagaccttggattccattaccaggactgcacagagagcttggttattcccttcacataaaaaaaattcagatacagtaaatcaagaaaattacttccttaatgattatcagatacatatgcctttcgttgctagctaaatgatttagtacagaaatgcttggatggaaacctgttgagtgtaggtgggcacaggaagggaaggccttaagcatggctttgagcaccatcattcctcagatgccataggattcaggaccagaaggatgatctgtatagcattacaatgagtagggaaaagatccttcatgtcctgaagtatctgcttcctttattgaagcagatctctcaggttgatgaacaagtgcttaattggaatggattgcctgaaaagactttcctttttgtaggccacactgaggacagttttaaattgtggtgtttactttgtcactgttggaaaactcatgggctccctgggcctgctgctgggtggccccagaggcagggcagttggggaaagaccccagagagtggatcacttctagttactttcagagactaagtcccataacctggcccaggtcagtgtggaaattccaggtggttaattaaagatctgagatacactgtttcacagtaggtcaagtgtgagttccactgtcagggctttaggaccagtataaatctgagcttatataatgagctgatgaagtaggcaagtctaaatttaatgaatgtacaacagcattgaccaactggaccagtgcccggtcttggcagaaggttcacacactaacaacggatgcctcaggcaaatgatccatcccatgtgtgactacaaaagtaatggcttcctccgaaccacagctgcaactatggacacaatatgaggtgactttagtgagcctgtgacctcggtcatgtagacttggtgctacacactagaatcatctctctgaaacccaaatccctggacttactcagaactactgatcagaggggctaaagctacaagtgaaggctgtcagataacccaagaggagatgaagcctgttcctccctcactcatcctccaggccagcctggtaaatagacaaccatgcaagagccatctccagatgacccaggcttctcatggaaagggatgagatatttaagtccaacagaaactactaagaaacagagcactaatgcagcagaagcaagagagatcttgaagaatggtgtgttgggggaagggagagtttattggcaccgtttcttttaggttataaagtaatcctctgtttagagctagtaagtcctgttgaactattcagattttaatgtagctttaagcttttcaaggaaaaaaagggggtctttttttgtcccaatatcatatatgagcataagagagagatgcagagtttttgccattagctctgcatcccattactgggagaagggagcttttctcctgcaataatatcaggttttgtaataaatagcactgtgttaacatgctttgtgaatagtgtttcattttagtgtaatctcgtgttatatattttaatatattttctacattcttaaattgaatatatttgctgtctttggacagcttctttgaaggttgtaaatgttagctataattttctgtgaaagtgcctcctatggtttcttctcaaaaactggttgttaatttaggggatggtcattagaggcctctaaactgacacacaatttcccagtagattaaactttataggagagagctgcaaaaaatgaacataagctacataaaagtcttcagaaagacatagaacattgtaaatcacgtaaatatatcttgcattatcctcagaagcactgttttatttggaatttacaaaggggagaaagcaactgagaaattttgaaataggggtggacaggagggaatggagaaaaaaagggaatatgaaggaaatacctgactgtgcttttatgatgcctcccctggtagtgtcttgagctgtcgtcaaaaactgggtcactttaaagcagtagctctcaacctgtgggtcgtgacccctatgaaggtcaaatgacctttttttcacaggagtcacatattagatgtcctgcatatcggatatttccattacagttcataacagtagcaaaattatagttatgaagtagcaatgaaaatagttttatggctgggctcactacaatgtgaggagctgggttaaggggttgcagcattagataggttgagaactactgattagagagttcctgtaggtgattgtccatcaacttggactgatgtcagtgacattaggagcaagccccgtgtcctctactgtgggctttaatgtccctgatggtgtagtttagtccttcctaaccctgagccagtccaccagtgtatataacgtccacagatggccttgtgaaaatgcacttttctgagcccatctctggagtttccaattcagtagttctgaacaaactcaaagctttgaatctctgcggaattattctaacaagttcccaggtgatgccaggtgctgttcatccaggcagctcactttggaatctttcgtttgactaacaatatatgggaatgtggcttctatcaaaactccatttgaattttgtagagggcggttagagtatgggtcaccctgtagtacaccaacatgttcagtagagaaatctgtagaaggctcacttgtttgtttcctaattaagagtgagcttttattatacacactccattaaagcaagttaagatgttggttcccaggcagcacaggtcacactgacatgtatggagcagttacagctgttactacctttatatgtttgcagatggctaaattgggtgcttcggtttgtccttgtgtgtgtattcccttgtactcttgctgacttttcatgcaagataaagctggatcagtcagttttccaacctgcacaagcttttcctataaaaacattttctggggtgaacaagaaatgtcccacacttcatcatagaagagacaaagaataaggcttgccagctgtggctttgttccccactaggaaaggacttggttgtctttgtgttgtcatttatccccccaccccgctactcatttaatattattttctcagtaggatatgagaagggccatatgtatctgctttgtagtctgtctgaagcaggtctgaaggaacagatgcatggcaggatggaattcaggctagaacttataaactgaaacacctaataccttttgtggctgtgtggaaatgagccaaacttgggtccaaagttctgactctccacttgtattgaagttagcctccaaggaaagaaagaaataggaagttagttccttctgtctgaatcacagagggttgtgtttgtttgtttgtttgttttttaagaactgcttatttttggtgtttgtagtcatagtgagaattccttacaattgttgtatggacactataaagaaagtttaaggatagcatggggatgtaaactggaggacattactggattaacccatgtgaaacttgagatattttacagtaataagagagtagtgtcggagctggattgactgtggtgacatgtacccattctgtgttaaccaaaagctctgtcttggggattgttatttatagtgtcttccttgtgtcttccttgttattgtcatagactgatcagccccattcctgttccccaatcatgccttgaaccactgcttctgccccacactggaagtcacaggctcctctctggagtcttgatcttcttgctgagttaaccgctttttgcctcacttcgacaactatttccatctggatttggccagctttcacactggcccagttctgtctcagagaacctggttgcttatggttcatgtctgtcttcttgtttgtcgatcatctacctacctgtgtgtacatttatgtatgtatgtatgtatgtatgtatgtatgtatgtatgtatgtatcatctatgtatatatgtatgtatctcatctgtctatcatctatctatttaccatctgtctatcaaccatgtacctgcctacctacttatgtattaataatcatctatctatgaatctatctatctaccatctgtctgtcggtccatattatctatctgtcagccttggactgcagaattgagtcttaccctagtgtttgtctgtgaatgcctaatcatgtcctaagaaatgacaggttttgttccactgaatcctttcctctgaaagtgtagagagagtctatcacttccaccttgtaggagtgagctgctgcagaaagtgacgggtcactattaaagaggagaagctatcatcagtctgataggaatttgttcctcaggctagtcaagcttttttgtctctcttgttttttacctaccagtttaaagatagtgtcttgctatgcaactctggctggcttagaactcactatgtaaacaatactgacaatgaacttagagaaatccccctgcctctgccttaccagtttggggattgcaggtatatatcatcatacttggattttacatcaagcatttctaaggaatggatatactttttgagaaatgtaatatacctgctggccagtgccaatgggagagaaatgtcctcaggtccatgtgcttgggtgcttaggcagtttatatttatacaagcagtaagagtgagcagcattctgtgcctccttttaaaagttatatatgtcattagtgaccatgttttacacaagtctcacttactgtccatgaagccattctgctcacacacaatatttacaaatggaaacacttccttgcctccaactgagacattccccttattgagattgatcactggacttaatgacattaagagttcttaggaggcagtaatgttcaacatctgttagtgctaactattgctgtgttcaaatactaggaaatgtatattacagttctgaacaaaataggagacaggtgccaccctgatgggttttgttgttgttttttttagaaatgggggaggggtgggagctaaagaaattaaaccttaaatcagcatcattgagtagaataaaagaaaactaaaataaaattctttaaattttctatcccggtactttgcctagtagttcatgttgtgtttttaatacaggagatctacttcgaggctttaaagataaaattagattcagaaactcaccacttaggtgtcaatgaatccaaactcacaatgtcaaaattatattttgatggttactagagtttgaatacaaaaatagtgcttttgtttttggtatttttgtaagacaagagtgtcatgcagaaagactgtggaactaaatctaaagccccatcttggctctctgcctactgggtattgggtttagggaagtcactttccttttaggataggtggtagtagggatcccatagggctgttgtgagaatgaaatgcagaaaagaatccagtgtgttcactggcaacttgcaagttctcagtggctctctttctttccctccctcacttcttctctctcttgctttctccctccctcctctcctcccccgtccctcattgtttaaaggactgttgataagccaagttgatctctgtgacagacacaagctccccttttgtcctctccttgtatcccaggtagtactacagagagttcagagacagtttcttccaagaagccaagacaggattcgaccttggagcttatagatcctaagccctactttcagatctctgcactagacttttgttccactgccacaaagagtctctttagactggctttccagagtgcccacaccatgtctgcttgaaaaatgaacttaatgaacagtgaacctgtgaggtgaagcatgtgtgggaaagaggcaattgtattgatggcctgggccggcacagtgtcacaaagccattgtgttggcatcgctgagggtatagccttggtctctccttgtatcattttgcaaagagtctcatccaggctctgtcatttatggcaaaatatagtccatggtgcctataaaaccattttttggctattttcttacccccaatttaggttttataatttgtatttctctaatcttactgtgatggtgttttctttgtagctattatgcaataggtaatgtgttacactggagatcagcaaaccacccacaggccacatctggcctgcctcctgtttttgcgtggccaaagaactagtggtagttttaagagttttaaagataaatttaaacaaaagtaagttattaggctttggatgagaatagctgcttaaagaactgagggcattgcctcttgctacaaacctaaaactctctggtcctttctaaaaaaacaatttagtgacctcagcttcagacttacatctggaacctttgtcaatgaccaaatgaaatcaaggaagccataaagtgaattaactaaaataaattaattaaagaagagaatgtatactaagaggagttaagagcatataatgcttaggaatttggctaggcctgtaatcttttagatttagcagatacttaagaagtctcccagcccatggcttttgcagagaactttatgagatccagcaatgaaagcagatggtagcaaaagtctgccttgaagggatccaggctgagtttcctcctctttaactttcctgtgatgctctcgaacgccctaagattagaggcttcaaatagaagaatcattccctggattcatcaactaacaagaagacctatagaggcagcctggggtggaatgccatgacagacaaggttctcatccaggaggaggcttacagagagaaaagaactgggttttaggcatgacgagccagaggctggcagtgagatccaggagctgtcatggttttgccctatccacatttgttctttctggaagggggagtgtctcagcctgtagagtaccaacacctattttctaaaatcacagcctccctgagatgtacataccaatcctcagaaataaaacaagaagctgaacatcaagcttgaggggcccacttggtcatagtccaacagggaacatacttgcttcctcaaaatacattgtgtctcacaggagaccttgaagacagtataactgaagcttctgtttcccaaatagggaaaaatattcaatcaaaattctttccaaaatgttgtatgggaacatgaattcttaataaaatgtgactatctgtttatgagtccagtaagctaaagggtaaagaaaggctgtgagaacaaggtgtgaaaatggaagaaagggccacaacaaaaccaacttcattgtctgtgcagttttgcctcaggccagtgatgactgaaggctggtccctcactgtacctcagttcctgcaacacacctagaaaagagaggttccctcagagtccacagaccagcatttcattttgctagaagagcaaggacatcaaaaccaggttggccgtccttgctacagatctgtttgcaagcagccttgactacacataagttcagagtccatatggatgtagagcaggtggggtcaaggattctacatttggtggtatcgtcatagaatacatagcaagggttaggagacccaatatgtttgctaaaatggttattactttttatgaataagttggactttgctacaaagacagagcagagaactttctaatcaccaccaggagcagttagccatgccagctccatctttcttctttctgctttttcattctgacagggggtgaaaatctaaagtacatagagagacagtgcagatatccaaagggaagtcttgactgatttgcatgttcacttataccctaccaactttgctgtgtaatttagggtgactgagtaggagagttgatacttaagagaagagaaacatagtctgaggtttgaggtttgatgtgtcatgaattgtctggaaagatctaacagggctgcatgaaatgttggccccagagaagtgccagaatgatgccattcgagttgcaacagaatgtctttgttctgaagcacagatgttccaggaactttccccgaacagaagctaattacacctggtatttcagaatgtttgatggtaacctttgacattcacgctggtgacataccttctagttgtatcatggtatattccagaaaggcttgagagcctgtgtactctccccaacactaataacatcttccctggtggtaaatctagctgtgtgagctagaaatgtaattggactgcctactctgaagttcggagctcttgggagaatatctgtttgtaagagaacctgaatattcatgtaactgtccagacatcaataaattcttactttaccttatttatttctgttccccagtgaacagcggcacagttaaacacaaagctaataggtacattcttctgagctgtacccttacttaccttaattcagcagccccctaaaacattgctttatccattgccaggtagctctcctgtcaggtgacacatgtatgttttctttgtcttagagcactggagacagttgccattgtttgccatcaattagctgagggtagtatgtcagggatgtacgggcattgtcattttagtctgacagccacccgatgcggttgagaagggattgtttcattatgctgttatggggctgctggataatgatactccacactgcaaagtgggggttggggggaggcgggcagaaagaatggagttttagtgattggcaatattaaaattattcatgccgcgaggagaggggaaagattagagggaagaatgtgcagacccttaggaagttgctttctcctaacacagccagattgtggatgcagtctcacccttcctgatggagagacagaggggcagtaccctgacattaggcaggaaggaaaaagggaacagcgccttctcatccacaacaaagattactgtaaactggggtttctcccattctccaattaactttagaattaaatacaggcttcctagcaaattgccctggcaggcattttccttgctagaaaactctggtgtgtgaatttaggtcaggagggcgttttccattggatgacagtgcaattaaattgctttgaggtgtttcgtgaagaacagcagatggtattagacttaaattttcacttttgggggccaaatttctggatagccccaatatgggacattttcctcagagcatctaaagggaagtctttctttaaattctgaaaattaaccaagactggatctatatgctcttggagaggagaaacaaacaaaaagaagcactgaaattgtaaaaatacttcaagataaactaagcttcaagagggacaattgtgttgacattttactaacaccccattttctctccttaacgaagtgcagtcatgcatgaaaatgacttgttatcttctaaactgaaatgtattatgggttgtatctcaaaggtgtgtattactccttcaaagtaaaggacaacattttaaccctatgaggattcgttctaggccccagacactttgtagcacatgcataaaaatattgaacaataaaaagctgattgaatgtgatgcataaccctctccattgtgaggaactccaatgcacagtttatatgcctttttttttctttctatctgggccttagatgagggagcttaattgtatatataccgttttggagcagtgtatgtctttgtgatgccctaatcgtattaaaattgtattaattgcaataatacagtcaaatgataagggcattctgtaagtgtataaacggagttcagcctttgtgctatgggtttttatttttttttttgatcttacttattttctgtatatcagtgttctgactgtagtacacagtgcagtgtccacaaaggctgggccacaagagggtgtcagtcccatgaaactggaattacagttgtttgtgagttcccatgcagatactaggaaccaaatctgggccctcttcaagagcagtaaagggtgctaattgctgagccatctctccagcccccattttgggcttttaatacattgtatatctatatttcttcatgcaatcctgtaaagtattaccctttttaagatgaacaaatgtcaggcaatcattagagctgagcttcaaatgcagatccatgtaactcccattgggtgcacttttttctattcctcaccatgctggcactgtctggcctgagtgcttgatttctgatgaggccagaggagccaaaatcaccactgcggttaaatgatttattgaactcctcccaagtctgaatttctcctctcaggagagagatggagagacaagattaagctcacctttcatatggaccctctaattcttgttaatgtctgcttgagagccgatttactttgggctcatcgattattttgctcctctgtgccttgacccttgaaactctgcctaagagatgaatggtcagcccagacttcttcccttgtgatagccaccaagcaattaatgtcatttctcaggagcccaaccaacagggctctgacattcattacaagtgagggtcatcatcttcgaataactctgattcctttttctagtgaggacaggccggagccatgctagggcttttcaggaaccatgaatgccctgaagcaggggcttgcagggaagctcagtggtctctacacacacacacacacacacacacacacacacacacacacacacacacacacacacacacacacggagtaaatctcctctaggctcattatcgatggcccaggatatcctgcttgctacactaaagggctcctataactgatcgctcacgcatcaccctgcaggcctctctcctttccttgcctgtggatcaatatgcctctgacatggatttgaaacctttatttgggaaaaagcacatttcttaccagctgtttgttttccaaaccaaataattcagttaatttcttgtctggattacatttcagaactggtagatttccctcatcagggctgagaatgggcagggacagagagtgcatttttgaccgtctgtctcactgagtgttgcagccacctgtgtgcctccactccacttttcaggttccctgctagatatggatgcagcttgttttgaatccaactggcacttgagaggtagtgtggggtgatggttaggggcatatgacctgaagtctcactttgaatttcaccttcacttgttgctcaccgagtgactatagcctttcatctaaccaggaatcagatgagacctcaagcctcatcgataaatagcaaatgtttatatgtccttggcacttgacaagtatttgatcagtcctaactgtgagttccccagtatggagaaggacgcagatgaaatggagctgagacctagttcagcccctgctacccatatgtgtacctggaccacttggagagtcacaagaagtttagattctcaaacctgcctcggcctaagatctagggaatcagaaaatatgtcttccttccatggctcttttgggttatcagattatttcatctcaaagaacagaaatatagctatactttactgccctgaggtttgaagctagttttacacatgctattcaaggacttgcccattgaactatatccataacttctactttcaacttttttttgtttttttgttttgttttgtttttgtttttgtttttgtttttgtttttgttttttttggtttttcaagacaaggtttctctgtgttgctctggagcctatcctggcactcgctctggagaccaggctggcctcgaactcacagagaaccacctgcctctgcctcccgagtggtgggattaaaggcctgcactaccaacacccggctccactttcaacttttattcgagaccgtctcactaaattgcccgggcaagccttgaacttgaaatcccttgctttactctccctgttatcaaggattctaagtttattccaccagacctgtctatgctagctactattttatgcccctgactaacaggaaagtctgtgtgcccaccctctggatggatggaaacagtcaccaaatgatgtggatggtaccctaccccagctctgggatggcccaaggcaagtagtctttatttggggtccctaaagtactccttgcatcctccgttcatatgttaaatacctcacaagtgaaatatccccaaaggtgccctgttcattaaaaataatatagtcataattattgataatataatacatcaattattataattaacaacataacattacacaatatattataacaatcattatactaatatttattattaataataaataatatattaatagttattgataatataatgcattaattataatatcacagtactgtataatataacaactattatattagtaacaatattattgttattaataataaataatatattaatagttgtaacagagatatgctgattgatattgactaactgaaatagcttaaggtggcagactggacttctgtggccccaagggcctttgagatagcatctaagagccatgtgaatcacagagccacctctccctagcactgccataagccagaccccggtgaaagagtccatggcagtagggggaacagggctcctggctctgggcagcaggcagagtttatacattcattgcttgatcaggcttcatttccttggggactccaccatctcttaatcacaaaggcaataagggtttctagtttgttcctttgctgtgcctaatcagttgttccagctgccagtcaccagccctgtctggaagttcactgaaaagcccccttcgagctttggagacagcactgacccccaaggtgacaccaacaatgaaagctgcctccagggaagtctgtgtctggttgatttgatcacaacagttttgttaatgctgtgctgtgttctggagggctccagtctcttctgtatgctttgatcaataggccgcattgtacactccactggttgagttgtggaaatcattttgagtaagtacggaaatattttttccctttgtgaataacctcatagttccaccccagcatggagagtttcttcctaagattggaaatcccttggcaaagactgtgcatttgtcagtgagcatatgctgaagcaggcaggtctgtgagaagccagcaggtattgaaacttaaaacactaagagttagcacctgctttatgcaaagaaggtattggaatgttttgttcaaatgaatgaaggagcaatacttggagactatatacttaagagtatagcctagatgtttggtttggtaaggttagacattcctggaaatcactgtggacagcaaagacattttctgggccatgatagcagtttctgcgacttgtgggtccttgataaaggccaaggatagttagttcccatgcctgtagctagctgacttcagagagttgtcctttgggtgtacattagaaagccaggtgtgtttctcttattacttatcttcaatttcatgtcattattttggtcataagtaatatctgcaactagcaattataccctggactctgcaggcagactcttctgtatacacattgataattagtttctttcaactaaggcctaatctctctataattctgataaaatctctgtaattttcatcacatatattacaacacagaagtaagtgattggctttcttttgcagaaaagtgattgattatgccctatgtaagaaactgttcaaaaaccttcaaattcagactttaaactgaagcctgaggccctctatttcttcttctcatggggtgcctcataggggatctttttctatttcagtattatgaatcagttatagctataaagggaaggactgtggacatgtgtttgacctcggagcttgtaacacttggaaaaaaccaatccgtagccagtcacttcaaataccttacccagcacaccttctcaaccaccacctctccctggccattgtagtgtaccttcatatagcttggacagtcctttcctcagtttaccattgtactcctggctttctgccctaagactcctggatttcttgaggttaggcctctgaggcatgaatctgcttacaaatctgagagaattaacacttccctgggtcaacctttgatcagaaaaggacagaaattgttggataaaatttctacctctatactagagccccaagatatattttattggcattttgattatctttattcattaagaaagcaaacatgaattgatgcggttggagatagcagatcttattttatagtttatcccaggaccaagttttgtgtctgtcatatgatagctacttcataactatttgtggaatgatcggcaccttagagaagtacataaagaggccagggttgtagctcaatggaaaatcactttcttaacaagcataatgttctgggttcagtccccagcatgaggagggagagggtgagggagaggaaggtgaaaatagtaaaataagcatgtcaaagtagaggacttagcaaaagtactaaagtataaactgttgtaattaatttggaatgtggtcacctacctgtttgggtagaaccacaagttagtgtgtattggaacattgttaaaaggtcaaccttagtaaatcttggtattttgatagaattaatgcatacgggtatttctccatttttaagctgaaacccattcaaggacagtagtacaaaaatgatagaataactaatatatatgtgtatgtatacatataaagcagactcatcatttaaaataatgttggatggtcatgaggaatcagaaattttgagtcaggtgtagattagaagaaatgacatatgacaggtaggattttagttgggggtggtaggggaggaagggagggagaagggaactgggatcatcatgtaattcaatcttgtttgtaattcaaatatataaaattaaaaaaataatgttggatggatagatgatggataagcaaacaataggtggttggttgtgacttggctaggagaaaggatagttcctcagcaactcctcactttgagtgacaggccatattgtggtgccatattgtttagcttatttaattgtagctaatgtgaaatcagcagttactgcaaacctttgggaaacaccctattttctgctgaaccatagagtaaagcatagcatgagcaaccaagtttcctattgcccactaggttgctaacagcaaggcagtgtgtcccttgtgataaacataaacacatacaaacaaaaatacctctaggggtacataagtgaagggtatattcagcaccaattacaaaataaatgagagctgttgtttctatatttaagcagaattatttttcaaggtagctatgctttcatgatgtttgtgtgacctattattccattagtttttagaacagtatataaaatccacactccatgctgacaaacaccaatattgaaactattgctacagtcaatccaaacagccttctcccttggtccacattattatttggaatacaagcagaattgtggttccctgagccagcagggcacaaatgagggcagtgattcataaggtgactccagcaagtttgcaaatgtgcaacttgcatgcaggctgacacgcacaagagaagcttggggttgactttttgaactagtaagcacttcctggcctcactaccactttaggacctagaggactatggaagggtgaaggtttctgaggatacgagtaagcctgacagaatgctgatttaccagaaataaacccttcacatcagatcacacccatgtcaggagctttttgagcgggaagatggtaattctgcctcttcacatgctcccctaagtccttgaactcttattccattggattagtcttttgggggctgggtcacccggggtcttaattctaccctggtgaggttggctgaaagtgatactggtctaaaaatacaactccctgaacttttaaaccttcaaatctttttctgataatatgactttcttaatcctgaacttgatttctttaattaaaaaagatccatttgttctttgatattggtaaagttcaaaaggagcaggactgggcacacagcagtgctgtgtgcaaggaaggaagaggaggagagccagtaatgatgccgcctgattgcagcctaatgatatgtctgccgagtaggtcccccacactaaggtccttcctctctgatagactttgaaagtgacaagccctggttatcagatgacatggttccaattagctgatgtaaatgggcacgcaggcaagtttgaggtcagatacagctctcaaaggtgaggctgccccaagaacggggctgagactcaccattagtgtgagagtggcagtgttggtggggggaggcacccagagctgtgtatgagggccagcttttcctattttgtcatcttagatgaggacttctttggagaaagaacaagaatattcatcacaccatcaaagaaatgcctgagtattctaggctcttagttaagggtatgggaccctatgctgtgacaagttatgtgggttctgttaattttacaatgactatggagggacatgacccatagtgtctaactacacagtgagaaggagcagaaggcctgtcttgtgcccctagcagtcagctgactgaacatgccatcatacaaccatgacacgaaaaggcacagacacgaaaatgttttcttagaagccaacagcacaagatggagtaattgtgatgaccatttaggaagctggcagggcacacagcacttcagagacaaaggtgagcctggagcaagcccagctggagctcctgagatggtgctgaagacgcaagagccagggaacctgttccaccatagaaacaaaagctatgtgtatccacgaaggggagaattgttccctaaaaggcactcagagaaaaacaaacaagcccctgaaatatgcctgctgtcagccttggtgtttaaatgtggcctctttcgtggcaccttctcatgctgcctctctctcttgatttcagctcccatttttgccagcaatcatccaaaccgaagtgcaacagctgctggggccgtgccacccccacatcctgtcagtcacccttctccgggacataatgtacaggggagcccccacaacccctcctcccagttacctccactcacagctgtggacgcaagcaccgagaggtaaggccatctgtctctctctcataataggtgttaccgccaagagaagagctccgacagccgctgaattttattaataatccgttggtgggttgagttacccaggggtgacattttaaaagtaacatacacaaagcatgtggaccaaatacctcattatctgttacatttttttataacaaatgaaatgatactggcagtcaacagcaactcaagtgtcaggagctagaaaatgtatcacaatgtcccatctttgccacagcaccttgtgtcaggactcagttttcagtgagttgaggggctggctctccagatacaaaaagtgccatggtcacatagatagcaatataagtttatgtaataggaagctttccattattgacaaaaatgtctgaaaaacagtaaacatacaagtagggtttggttcactgtttcagtgatttcaccccatggtcactgggccttgggttcatcagggtgggagtctgtggccgagaaggcctgctcacctcatggtggctaggaagcaaagagagaagcaggaaggcactacattctcaatttctccttcaagggcatgtccccagcaacctcactttctgtcactagaccccacttccttagagttccacttcctccccaacgagcacatcaggatagtaacccagaaaatgtgtcaacacacagaccatgggcaattgttcaagattcaaactgcagcaccttgggaaaagatgacaaagtgacagaaaatattatatgactgtcaggaagctactgttcactcaatacttttgttggtatcatcctcagaaagtatttctatgggaaaatccctgaaaaactgaatattccatttttatttctgaatcttcctatggctttatctgtttggggctagaggtgggttctcatacctctgtttcctaggtgcatctgtttcaatgaaccacaaagccagtttctccatgagtgaaaggcatggtggcataggcattgagagcaaaggaagttttctctatacagataaaagggggcagcatctcagacagcaaggacacctgcaaaatgagtaggaagagagggcttgcagcaagcaaaacggtcttgaccactcagggtagcaccatgcacatggatgatgactgggtgatgacgggctatctgacttctgtggagccatgtgttttaaactgaggagttgcccttatcctactggaagtaaatagccattgttagaagaaacatgcaatgaggttgactttatagaggaaggactctgcataagagagcagttgtcagttggaacaagagatggaagggtacaacgtgaagccatttcaggtttccttgtgaacaatatgatgccttggagtaagacaaacaagtaagaagaattcactcaagggcttaattaggaagcagatttgtcagagaataaagaacagaagccaagtccatgcccaagttgtctctggaaaactgtgcctttaacaaaagttgaaaaattaaaaaaaaaaaaaaagagtaggaaatgaatgtcagagaatgacttttatgagattgtaaaagaaccacatgtggacgtatgcaatgattagaaatgggaatcagaaggtaagaattattttaacagccatgtgtacatggtaaagtacagcctcccctcaaaggaactgtcagcaaaaccacgcccatgctcaccacccattacattcatggtcgttggaaacaaaaaatctattcttcagttacctgagcttatctatttcagttttacagttttacagtttccaaatggactaaaagtggtgttcatcatagagctcgcactaggcttcttagacaaacacatggtaccttggtgtgactggggaattagggttggcatctagacaatgttccatgatcatgatgacccatagtgtaagtaactatggagagataaaggaagaagggaacaggacaacacaggagctctatgtgaatgagtgaaatagagacgtttgcactttttcaggtttttgttgctgcatgtccttgccacaggatatgtgctctgaccctacacctcactaactggactgggcaaatgtgagatgtggcttatctctcccaatcaggttggagaagaggatgacatgaagaagccctgaattattcactgtatttgcactagggaccaggatgaaaaggcagagaggaaatgggcttaccttccgttctgggtttatacatctttgctctgtttgcctgggaaatcccccagtaaaaactctagcagctttcttaacggaaacaggttgatcacactttgcgtttttagtggggcactggcatcttttcctgcttcgcaggcattgattcatcatttacttagctttagctcattaataaagtgggctgagtcactgtcagaagtcagaaaaggcccccagcaactgcccatctaaagtcaagtcctttgatcctgaccatcgtaaaataaatgtaattctctcaatttgatgagagtctgtttttatttttaaatactaactgaatgacacatcatttcagggatttgagcagtgccacaacacatccctgatgttgatttgaacttcttaagggaagtggtgttttcctatgtcatgttgcttgagccaccaccaggactttatgtgtatgacagtggcttcccttgagagaaactcagtgtctttggaagtgttaagtctttgggcattatttatgtatgtctgttacaccaacaaatcacaaaaatatgtatgggtggccactttgaactggaaaaatctttgtaaccttagtctgtgtcactcactttgcaacagtgtcagctgactgtcttccttctgaaggtcacgcagggtacactttgtagtacagtgacagggatgggctgagagctaaggactctccacaaaggagggtcttgcagaagctttcctgacctccacttctgagacacagaagattgaaacaaaagtaaggattggttttctttgcagaatgtgtaatctggcacaggaattaagacccgaaaatattaggaatcattgttttggaaaaatagttaaattgcctttaccaaataaaaaaatgccagtttctcaagtcttttataatatgttatttcagatgtggcgttgctagaattctaggcatttggatatatgagggcttgtatgtcattgaccatccaaagctaatcctcattgccatgttttaactcattactggaaacttggtactgtctacctagatgctgaaggtcaaagagtcaccatctctctgaattgtttttgcaattaataaagctctccattctaggcaagccagtctgttcaccactttatacgttgttttctcaatggcatgccttaacttagcctttccagctgttatatgcagccttccgttctcagcccagaaaacctgctccctctcaggtcagaggctgacacccctgtagagccccttggttcttaggatctgttttatctatcttagatttgatagtatatgcaccagctagagctgagtttgatgttgggagggcagaggccttgtttcctcataaccttcagagtatttttctctgagttacacgatggtgcatgttgaagaagctttaacaatggataaggaaaattgaggaaaatgcctgggagacaggaaggcattgcctacccactgtcccaaggaagcttcccatagttttctcttggatttttgttttgtgtttgttagaaggcaatggctttgattcttaatgcttctgccatcttatacctcttgcaaactttgatacaattcctgggtactagtctaccatgcatataggcatacactaagagatacggtgttttctgtgaccatcactactagaaaactggtactgtggtctcttatttgcatatctagcatcagaatatatcaaaacaaaccctgttgctttcctaatcttgctcctaagcaaacagggatcttggtgtcttcagctacatagcttttccatagcctcatatgcattatgtataatcttcattctcccttcttaatctcctagtatatatattcagtaatcttaaaaaatgtagcaagatgttaaagcttatcaagatctatcctagccctggggactctgtggttcatggaatctttcattggactatgatttatgaagcatgagataggctggacactgactacaccatgggaaacatgataaataagagccataccttctctgcacactgagtctaatgggggcagccaagccaataggctgtgataatttagacaagggaagggtgatacaacagctttgaaggcacagagcaagagcttctgttctcaaaatgagggaagaagtaatgtgcccccccacctccaaaggcactaaaggtggttgtaaatgtcaagagagaagataacaagcatgggcggagctgagcatgtcactaagagtcaccctatattagccacattaagtagtttcatcttcctctggagaacaagaattcatatgttcacccaataggaaaccgtggtgactataccgtttgttctaaatgtgcctgatattcatccacaataaattcagaatgtcttccagaaaaaatgacaggaaatgggaaagtgtttcatttggtctcagtcagacaaaggctgtcctctgtaactcttagattaataagtcagcactgtgagattgatgttattttatttcctagtacaatttgaaaggatagttttgttctttgccatcccaagcttttatcctagacatttatggtttaccgggtctttgaagactccctgagtgtcaaaaaaataaaatgaaaattctctctgttagagacagagtataaaggtctgggaatcagaggcactggttggcctcacttgtctactgtattagaggagagttaacttctgctaagagctctccacaggactgtgtgtttcctcacatagctgcaggttactcggggcacatcactgaatgaccctcctgacatgtatggcagatactttgtcatgtgcactgagacattcctaacccagagggcaacaaataaacacagacaataagtaaagtcagtccgtcttgattctcatgtgtcatgaactccatagcagcaggctctacccttggatgataaagatgtcagtgtcagagagttctatgagaagtcaagatgtggtcctcacctagcatcccctgaggatgtcagttgctttctagaaatatggcttccatgggcatttgagattaaaagagtaagagccccaaatcccctacttctcccaacatgaatgtatgtgtgcttttgcacacacacgcacacatacactttgagaagtactgaatgtcataaaagatgaataagtggattaagcaaaacccatcactagactaatcttccctgacctacctctggtttaaatgtccctcagactctcttggtaatgtaatcaagagttaactctatcaccatctttaacttaccattaaagacctgaaaagcctacagctgagctttggtcttttccctaaccctttcacatctaattaatccatcatctgtcaagggtttccaagcttcatcagcaccattcttccacttcaggttgggccccactgcctggcctgcatctcaagtacaactccctacctgttctctctgtgtctcattttgcctgtccacagcagtcctcctcatcccataagcctttgctctgcatcacaagacctgctctttaaaatgtaaataaatcatttgttcctctccataccctcctccatcctaccaagattaccaaactcctgttctgatgatcctctgtggtatgggtcagccaagttccccttccattactacccatgtttaaaaagccaaagacacacccgccttcatgctgttcctaggaaggaccaacataccttgcctccagccttagcattcgcagatcctgagacactaggtcattatgatgattcgagcctttctttgtagtgtctcctcaaatggtgctgttctaacgaggcatttctttggagagcctttgtgtgcttgagatggagttgtgaagccctggctggtctggaactcgatatgtagatcaggcctcagactcacagtgattatcctgcctctgcccccatgtactagagtgacaggtatgagcctgcatgttggccccagagaagcattccctgtccagctgcactctgttgcttgactctgccgtttgccttcaccagcgcattagctgaacttggggtatgattttattatagattcatagtgattccattatacgaggtctctctgagaacagagactatgtcaaggtgacaattgcctgtccccaccttagcccctcagtgcttctggggaaatctgtggcatttcatggagcacatgggagtgagtcaaggaactccattgtgatggtggcttcactgtttctttaataataacctgagcacatggttgttgtccttccaccactttctgctttggtccctgctggatgtcttgctatgagactccatatgcactaactaaggaaacagctttgttctggtcccaatacttgttcacatcagattattatttatgcattttttgtttttttttgtttttgttttttttttttttggagacagggtttctctgtgtagctttggagcctatcctggcactcgctctggagaccaggctggcctcgaactcacagagatccgcctgcctctgcctcccaagtgctgggattaaaggcgtacgccaccaactcccagctgtttatgcattttttttaaaaaaaaattgaaacatactgttttatcactttagcttaagtatattaccacacattaaaaaaatcaaaacttaagatgtctataaaagttactttttttttttttttttttgagtgctaaggaagtcacttggaccgtagaagcaaagacagccgtctttattttgttcccacattccaaacaaatacccttccagttaaggccaagacaatgttttcttagttcccttggattttctgtcaggaaagtgagtcatggctataagaaagatggcttgaagtaaaatagaattccttttttgccatctcgactttaacacatgaagcaacagaagtatggtactgttgctaggccgtggtattattcaaacttgccagtgtgttctcttctccgacaaattatgcacagcccagatctccaaggcaagagctcagcagccttccaggctgagttacacagtcctaagttgctgctctctggtattgaacaggccactccagagtgaggctccatttcatgtcctagcagtgtgatctagattcataaagtcgtttctcttcctaaggaagggcattcactactcagacacttccatatgtttacaagtgaagactgtctgttggtcaggaaagagactatcaagatgaacagacgctaagaggcaatgtgtttttgttgttgtattgtttgtttgtttgttttggcttctttttctgagaagtctccttggttgtttttctgtgtagttgccaggaagaaaagccttgtgttttagtcagcctcagagcaaacggttagggacaatctcttacatatatattcttttctggaatagaggtttcctacagaaacaaatgcaatctccaaagagatgtttatcagttgagcagatggctcatctacctggccgctggaattgatgctaagcaggaagttgaggctctggaagcaatggaatgttgagcagcgaccattgtttgctaagtacttgtgcttgcacattgctgggaaaggtactatagatacaaattgacagtaatggccaacaagttgcactctccccacccagaaccatgagcccttctctgatggattatagactttgaaatgctctttcctccaattcacttctctggtcagttattgaatcttactttaaagagaaggagctgaatatcccttcatagttacctgataccctaaagatggaaagaactcacatgcaaacagcacatgtcattactgaacaaactacccctcagctagttttgtaaggttcacagattatactggcctgtgtggtctcgtttagcaccagctttccaatgtatctagccatatatggcagaagtcacatttcaatttgatcctccaaattgaatagactttaaagaaactgtttatactttgaggcaatgaggaaaggtttaggatagtctgtgtgggatgcttgtgcctctcctcatgtttgggcagaaatagcagtttttcttgtctagcattcccattacagtctagaaagcacattgaacagggctgccatgctcgacaagagagaggcacttgccttgctgtaggacagtgagttggcccatttggtcaggcccgctcacagcagctgaagaagagtgacatcactgtacaaatatgcttttcagaacatatttgaagatcaaatgtccaagactagcctagacaaaattttcttttggttaagtactcttttgaaaggagaatttggcagaatcgggcatttcttttctccccattcacatcggattctgaaacagaaaaatgactgagtcaccaccgatcctggggtccagatagctcagaaatcccagttcttgtttctacagaattcattgctcttgtgaacacagatctttttctcctcctccattttcttttccacaaaggaaaacagcagaacctttggcactccttcagagtttaccagacaaaaaacaaaaaccaaacaacaacaacaaaaaaaccccacatatttacatagaattcttagcctttggccttcattattttcttgactttacagcttgttccctgtacctaaataaaatagctatcctgcatatcactgcatctactccattttcataaatgctgattattaatacacgtttgagtccccttttaaaacaccacccacagtcctcattgcatgttccctggagacttgggggtcatttttaagtcttgggctcctctgttttgatggattgtttgcaataattattgatccagctgtttatgaggagacagatgcgattctccttcccagggc
